(19) United States
(12) Patent Application Publication
(10) Pub. No.: US 2019/0100745 A1
(43) Pub. Date: Apr. 4, 2019

(54) NOVEL CAS SYSTEMS AND METHODS OF USE

(71) Applicant: PIONEER HI-BRED INTERNATIONAL, INC., Johnston, IA (US)

(72) Inventors: ANDREW MARK CIGAN, MADISON, WI (US); ZHENGLIN HOU, ANKENY, IA (US); MATTHEW G. KING, JOHNSTON, IA (US); HAINING LIN, CLIVE, IA (US); JOSHUA K. YOUNG, JOHNSTON, IA (US)

(73) Assignee: PIONEER HI-BRED INTERNATIONAL, INC., JOHNSTON, IA (US)

(21) Appl. No.: 16/099,765

(22) PCT Filed: Jun. 1, 2017
(86) PCT No.: PCT/US17/35425

§ 371 Date: Nov. 8, 2018

Related U.S. Application Data
(60) Provisional application No. 62/352,193, filed on Jun. 20, 2016.
(60) Provisional application No. 62/435,145, filed on Dec. 16, 2016.

(51) Int. Cl. C12N 15/10; C12N 15/82; C12N 15/113; C12N 9/22

(52) U.S. Cl. CPC C12N 15/102; C12N 15/8213; C12N 2310/20; C12N 9/22; C12Y 301/00; C12N 15/113

(57) ABSTRACT

Compositions and methods are provided for genome modification of a target sequence in the genome of a cell. The methods and compositions employ a guide polynucleotide/Cas endonuclease system to provide an effective system for modifying or altering target sequences within the genome of a cell or organism. Also provided are Cas endonucleases comprising previously undefined nuclease domains and methods employing said Cas endonucleases for production of a guide polynucleotide/Cas endonuclease systems, for genome editing of a nucleotide sequence in the genome of a prokaryotic or eukaryotic cell, and/or for inserting or deleting a polynucleotide of interest into or from the genome of an organism.

### CROSS-REFERENCE TO RELATED APPLICATIONS

[0001] This application is a 371 National Stage Entry of PCT Application No. PCT/US17/35425 filed on 1 Jun. 2017, which claims the benefit of U.S. Provisional Application No. 62/352,193, filed Jun. 20, 2016, and U.S. Provisional Application No. 62/435,145, filed Dec. 16, 2016, all of which are hereby incorporated herein in their entirety by reference.

### FIELD

[0002] The disclosure relates to the field of plant molecular biology, in particular, to, to compositions of guide polynucleotide/Cas endonuclease systems and compositions and methods for altering the genome of a cell.

### REFERENCE TO SEQUENCE LISTING SUBMITTED ELECTRONICALLY

[0003] The official copy of the sequence listing is submitted electronically via EFS-Web as an ASCII formatted sequence listing with a file named 20170522_7129PCT_SequenceListing_ST25.txt, created May 22, 2017 and having a size of 923 kilobytes and is filed concurrently with the specification. The sequence listing contained in this ASCII formatted document is part of the specification and is herein incorporated by reference in its entirety.

### BACKGROUND

[0004] Recombinant DNA technology has made it possible to insert DNA sequences at targeted genomic locations and/or modify specific endogenous chromosomal sequences. Site-specific integration techniques, which employ site-specific recombination systems, as well as other types of recombination technologies, have been used to generate targeted insertions of genes of interest in a variety of organism. Genome-editing techniques such as designer zinc finger nucleases (ZFNs) or transcription activator-like effector nucleases (TALENs), or homing meganucleases, are available for producing targeted genome perturbations, but these systems tends to have a low specificity and employ designed nucleases that need to be redesigned for each target site, which renders them costly and time-consuming to prepare.

[0005] Although several approaches have been developed to target a specific site for modification in the genome of a prokaryotic or eukaryotic organism, there still remains a need for more effective genome engineering technologies that are affordable, easy to set up, scalable, and amenable to targeting multiple positions within the plant genome.

### BRIEF SUMMARY

[0006] Compositions and methods are provided for novel Cas systems and elements comprising such systems, including, but not limited, novel guide polynucleotide/Cas endonuclease complexes, guide polynucleotides, guide RNA elements, and Cas endonucleases, in particular, to Cas endonucleases comprising previously undefined nuclease domains. Compositions and methods are also provided for direct delivery of Cas endonucleases comprising previously undefined nuclease domains, chimeric engineered guide RNAs and guide RNA/Cas endonucleases complexes, as well as for genome modification of a target sequence in the genome of a prokaryotic or eukaryotic cell, and/or for inserting or deleting a polynucleotide of interest into or from the genome of an organism.

[0007] In one embodiment of the disclosure, the guide polynucleotide/Cas endonuclease complex comprises at least one chimeric engineered guide RNA and a Cas endonuclease, where the Cas endonuclease comprises a first nuclease domain of SEQ ID NO: 88 or a functional fragment of SEQ ID NO: 88, and a second nuclease domain comprising at least one nuclease subdomain selected from the group consisting of SEQ ID NO: 90, SEQ ID NO: 92 and SEQ ID NO: 94, or a functional fragment of the second domain, where the guide RNA/Cas endonuclease complex is capable of recognizing, binding to, and optionally nicking, cleaving, or covalently attaching to all or part of a target sequence.

[0008] In one embodiment of the disclosure, the guide polynucleotide is a chimeric engineered guide RNA capable of forming a guide RNA/Cas endonuclease complex with a Lapis Cas endonuclease, so that the complex can recognize, bind to, and optionally nick, cleave, or covalently attach to a target sequence, where the chimeric engineered guide RNA is selected from the group consisting of SEQ ID NOs: 128-138.

[0009] In one embodiment of the disclosure, the method comprises a method for modifying a target site in the genome of a cell, comprising introducing into the cell at least one chimeric engineered guide RNA, and a Cas endonuclease comprising a first nuclease domain of SEQ ID NO: 88, and a second nuclease domain comprising at least one nuclease subdomain selected from the group consisting of SEQ ID NO: 90, SEQ ID NO: 92 and SEQ ID NO: 94, where the chimeric engineered guide RNA and Cas endonuclease can form a complex that is capable of recognizing, binding to, and optionally nicking, cleaving, or covalently attaching to all or part of the target site.

[0010] In one embodiment of the disclosure, the method comprises a method for for editing a nucleotide sequence in the genome of a cell, the method comprising introducing into the cell at least one polynucleotide modification template, at least one chimeric engineered guide RNA, and a Cas endonuclease comprising a first nuclease domain of SEQ ID NO: 88, and a second nuclease domain comprising at least one nuclease subdomain selected from the group consisting of SEQ ID NO: 90, SEQ ID NO: 92 and SEQ ID NO: 94, where the polynucleotide modification template comprises at least one nucleotide modification of the nucleotide sequence, where the chimeric engineered guide RNA and Cas endonuclease can form a complex that is capable of recognizing, binding to, and optionally nicking, cleaving, or covalently attaching to all or part of the target site.

[0011] In one embodiment of the disclosure, the method comprises a method for modifying a target site in the genome of a cell, the method comprising providing to the cell at least one chimeric engineered guide RNA, at least one donor DNA, and a Cas endonuclease comprising a first nuclease domain of SEQ ID NO: 88, and a second nuclease domain comprising at least one nuclease subdomain selected from the group consisting of SEQ ID NO: 90, SEQ ID NO: 92 and SEQ ID NO: 94, where the at least one chimeric engineered guide RNA and Cas endonuclease can form a complex that is capable of recognizing, binding to, and optionally nicking, cleaving, or covalently attaching to all or part of the target site, where the donor DNA comprises a polynucleotide of interest. The method can further comprise identifying at least one cell that the polynucleotide of interest integrated in or near the target site.

[0012] In one embodiment of the disclosure, the recombinant DNA polynucleotide comprising a promoter operably linked to a eukaryotic-optimized polynucleotide encoding a Cas endonuclease, where the Cas endonuclease comprises a first nuclease domain of SEQ ID NO: 88, and a second nuclease domain comprising at least one nuclease sub-domain selected from the group consisting of SEQ ID NO: 90, SEQ ID NO: 92 and SEQ ID NO: 94.

[0013] In one embodiment of the disclosure, the kit comprises a kit for binding, cleaving or nicking a target sequence in a prokaryotic or eukaryotic cell or organism, the kit comprising a guide polynucleotide specific for the target sequence, and a Cas endonuclease or a polynucleotide encoding the Cas endonuclease, where the Cas endonuclease comprises a first nuclease domain of SEQ ID NO: 88, and a second nuclease domain comprising at least one nuclease sub-domain selected from the group consisting of SEQ ID NO: 90, SEQ ID NO: 92 and SEQ ID NO: 94, where the guide polynucleotide is capable of forming a guide polynucleotide/Cas endonuclease complex, where the complex can recognize, bind to, and optionally nick or cleave the target sequence.

[0014] Also provided are nucleic acid constructs, eukaryotic cells, plants, plant cells, explants, seeds and grain having a modified target sequence or having a modification at a nucleotide sequence in the genome of the plant, produced by the methods described herein. Additional embodiments of the methods and compositions of the present disclosure are shown herein.

### BRIEF DESCRIPTION OF THE DRAWINGS AND THE SEQUENCE LISTING

[0015] The disclosure can be more fully understood from the following detailed description and the accompanying drawings and Sequence Listing, which form a part of this application. The sequence descriptions and sequence listing attached hereto comply with the rules governing nucleotide and amino acid sequence disclosures in patent applications as set forth in 37 C.F.R. §§ 1.821-1.825. The sequence descriptions contain the three letter codes for amino acids as defined in 37 C.F.R. §§ 1.821-1.825, which are incorporated herein by reference.

### FIGURES

[0016] FIG. 1 depicts an alignment of a previously unidentified nuclease domain (referred to as Lapis Cas nuclease domain1; SEQ ID NO: 88) from the novel Cas protein of Lactobacillus apis (Lapis) with the HNH consensus domain from 86 diverse Cas9 proteins (SEQ ID NO: 97). Underlined residues represent the key catalytic residues of the HNH domain. Amino acid residues in bold represent the corresponding residues in the Cas protein from Lapis. An “*” denotes a perfect match with the domain consensus and a “:” indicates a conservative match with the domain consensus. The 86 diverse Cas9 proteins were aligned using MUSCLE (Edgar R. (2004) Nucleic Acids Research, 32(5): 1792-97) and a consensus calculated based on the amino acid frequency at each position. Only the most abundant amino acid at each position was reported and an “X” was used to denote the lack of a significant amino acid preference (X can be any amino acid). Additionally, positions within the domain consensus where only a few Cas9 proteins provided an alignment were omitted to reduce gaps in the final consensus.

[0017] FIG. 2 depicts an alignment of a previously unidentified nuclease subdomain (referred to as Lapis Cas nuclease domain2-subdomain-1; SEQ ID NO: 90) from the novel Cas protein of Lactobacillus apis (Lapis) with the RuvC consensus domain (subdomain-1) from 86 diverse Cas9 proteins (SEQ ID NO: 91). Underlined residue represents the key catalytic residue of the RuvC subdomain. Amino acid residues in bold represent the corresponding residues in the Cas protein from Lapis. An “*” denotes a perfect match with the domain consensus and a “:” indicates a conservative match with the domain consensus. The 86 diverse Cas9 proteins were aligned using MUSCLE (Edgar R. (2004) Nucleic Acids Research, 32(5): 1792-97) and a consensus calculated based on the amino acid frequency at each position. Only the most abundant amino acid at each position was reported and an “X” was used to denote the lack of a significant amino acid preference. Additionally, positions within the domain consensus where only a few Cas9 proteins provided an alignment were omitted to reduce gaps in the final consensus.

[0018] FIG. 3 depicts an alignment of a previously unidentified nuclease subdomain (referred to as Lapis Cas nuclease domain2-subdomain-2; SEQ ID NO: 92) from the novel Cas protein of Lactobacillus apis (Lapis) with the RuvC consensus domain (subdomain-2) from 86 diverse Cas9 proteins (SEQ ID NO: 93). Underlined residue represents the key catalytic residue of the RuvC subdomain. Amino acid residues in bold represent the corresponding residues in the Cas protein from Lapis. An “*” denotes a perfect match with the domain consensus, a “:” indicates a conservative match with the domain consensus and a “-” indicates a gap in the alignment. The 86 diverse Cas9 proteins were aligned using MUSCLE (Edgar R. (2004) Nucleic Acids Research, 32(5): 1792-97) and a consensus calculated based on the amino acid frequency at each position. Only the most abundant amino acid at each position was reported and an “X” was used to denote the lack of a significant amino acid preference. Additionally, positions within the domain consensus where only a few Cas9 proteins provided an alignment were omitted to reduce gaps in the final consensus.

[0019] FIG. 4 depicts an alignment of a previously unidentified nuclease subdomain (referred to as Lapis Cas nuclease domain2-subdomain-3; SEQ ID NO: 94) from the novel Cas protein of Lactobacillus apis (Lapis) with the RuvC consensus domain (subdomain-3) from 86 diverse Cas9 proteins (SEQ ID NO: 95). Underlined residue represents the key catalytic residue of the RuvC subdomain. Amino acid residues in bold represent the corresponding residues in the Cas protein from Lapis. An “*” denotes a perfect match with the domain consensus and a “:” indicates a conservative match with the domain consensus. The 86 diverse Cas9 proteins were aligned using MUSCLE (Edgar R. (2004) Nucleic Acids Research, 32(5): 1792-97) and a consensus calculated based on the amino acid frequency at each position. Only the most abundant amino acid at each position was reported and an “X” was used to denote the lack of a significant amino acid preference. Additionally, positions within the domain consensus where only a few Cas9 proteins provided an alignment were omitted to reduce gaps in the final consensus.

[0020] FIG. 5. Depiction of CRISPR-Cas locus structure for Lactobacillus apis (Lapis). The Lapis cas gene position and orientation relative to the CRISPR arrays is indicated. CRISPR arrays and putative tracrRNA encoding regions are labeled. Light gray lines represent regions of the putative tracrRNA with strong homology to the CRISPR repeat.

[0021] FIG. 6. Depiction of 5 prime secondary structure detected for putative tracrRNA (a) (SEQ ID NO: 99) from Lactobacillus apis (Lapis) CRISPR-Cas system when simulated to be transcribed in an anti-sense direction relative to the Lapis cas gene (SEQ ID NO: 110). RNA secondary structure was examined using UNAfold (Markham and Zuker (2008) Methods Mol Biol. 453:3-31).

[0022] FIG. 7. Depiction of 5 prime secondary structure detected for putative tracrRNA (b) (SEQ ID NO: 100) from Lactobacillus apis (Lapis) CRISPR-Cas system when simulated to be transcribed in an anti-sense direction relative to the Lapis cas gene (SEQ ID NO: 111). RNA secondary structure was examined using UNAfold (Markham and Zuker (2008) Methods Mol Biol. 453:3-31).

[0023] FIG. 8. Depiction of 5 prime secondary structure detected for putative tracrRNA (c) (SEQ ID NO: 101) from Lactobacillus apis (Lapis) CRISPR-Cas system when simulated to be transcribed in an anti-sense direction relative to the Lapis cas gene (SEQ ID NO: 112). RNA secondary structure was examined using UNAfold (Markham and Zuker (2008) Methods Mol Biol. 453:3-31).

[0024] FIG. 9. Depiction of 5 prime secondary structure detected for putative tracrRNA (d) (SEQ ID NO: 102) from Lactobacillus apis (Lapis) CRISPR-Cas system when simulated to be transcribed in an anti-sense direction relative to the Lapis cas gene (SEQ ID NO: 113). RNA secondary structure was examined using UNAfold (Markham and Zuker (2008) Methods Mol Biol. 453:3-31).

[0025] FIG. 10. Depiction of 5 prime secondary structure detected for putative tracrRNA (e) (SEQ ID NO: 103) from Lactobacillus apis (Lapis) CRISPR-Cas system when simulated to be transcribed in an anti-sense direction relative to the Lapis cas gene (SEQ ID NO: 114). RNA secondary structure was examined using UNAfold (Markham and Zuker (2008) Methods Mol Biol. 453:3-31).

[0026] FIG. 11. Depiction of 5 prime secondary structure detected for putative tracrRNA (f) (SEQ ID NO: 104) from Lactobacillus apis (Lapis) CRISPR-Cas system when simulated to be transcribed in an anti-sense direction relative to the Lapis cas gene (SEQ ID NO: 115). RNA secondary structure was examined using UNAfold (Markham and Zuker (2008) Methods Mol Biol. 453:3-31).

[0027] FIG. 12. Depiction of 5 prime secondary structure detected for putative tracrRNA (g) (SEQ ID NO: 105) from Lactobacillus apis (Lapis) CRISPR-Cas system when simulated to be transcribed in an anti-sense direction relative to the Lapis cas gene (SEQ ID NO: 116). RNA secondary structure was examined using UNAfold (Markham and Zuker (2008) Methods Mol Biol. 453:3-31).

[0028] FIG. 13. Depiction of 5 prime secondary structure detected for putative tracrRNA (h) (SEQ ID NO: 106) from Lactobacillus apis (Lapis) CRISPR-Cas system when simulated to be transcribed in an anti-sense direction relative to the Lapis cas gene (SEQ ID NO: 117). RNA secondary structure was examined using UNAfold (Markham and Zuker (2008) Methods Mol Biol. 453:3-31).

[0029] FIG. 14. Depiction of 5 prime secondary structure detected for putative tracrRNA (i) (SEQ ID NO: 107) from Lactobacillus apis (Lapis) CRISPR-Cas system when simulated to be transcribed in an anti-sense direction relative to the Lapis cas gene (SEQ ID NO: 118). RNA secondary structure was examined using UNAfold (Markham and Zuker (2008) Methods Mol Biol. 453:3-31).

[0030] FIG. 15. Depiction of 5 prime secondary structure detected for putative tracrRNA (j) (SEQ ID NO: 108) from Lactobacillus apis (Lapis) CRISPR-Cas system when simulated to be transcribed in an anti-sense direction relative to the Lapis cas gene (SEQ ID NO: 119). RNA secondary structure was examined using UNAfold (Markham and Zuker (2008) Methods Mol Biol. 453:3-31).

[0031] FIG. 16. Depiction of 5 prime secondary structure detected for putative tracrRNA (k) (SEQ ID NO: 109) from Lactobacillus apis (Lapis) CRISPR-Cas system when simulated to be transcribed in an anti-sense direction relative to the Lapis cas gene (SEQ ID NO: 120). RNA secondary structure was examined using UNAfold (Markham and Zuker (2008) Methods Mol Biol. 453:3-31).

### SEQUENCES

TABLE 1
Summary of Nucleic Acid and Amino Acid SEQ ID Numbers

| | Nucleic | Amino |
|---|---|---|
| | acid | Acid |
| | SEQ ID | SEQ ID |
| Description | NO: | NO: |
| Cas endonuclease protein from Lactobacillus apis | | 1 |
| (referred to as Lapis Cas) | | |
| Streptococcus pyogenes (Spy) M1 GAS Cas9 | | 2 |
| Streptococcus mutans UA159 Cas9 | | 3 |
| Streptococcus thermophilus LMD-9 Cas9 | | 4 |
| Streptococcus thermophilus LMD-9 Cas9 | | 5 |
| Lactobacillus rhamnosus GG Cas9 | | 6 |
| Veillonella atypica ACS-134-V-Col7a Cas9 | | 7 |
| Treponema denticola ATCC 35405 Cas9 | | 8 |
| Mycoplasma canis PG 14 Cas9 | | 9 |
| Enterococcus faecalis TX0012 Cas9 | | 10 |
| Mycoplasma gallisepticum str. F Cas9 | | 11 |
| Coriobacterium glomerans PW2 Cas9 | | 12 |
| Fusobacterium nucleatum ATCC 49256 Cas9 | | 13 |
| Finegoldia magna ATCC 29328 Cas9 | | 14 |
| Oenococcus kitaharae DSM 17330 Cas9 | | 15 |
| Peptoniphilus duerdenii ATCC BAA-1640 Cas9 | | 16 |
| Coprococcus catus GD-7 Cas9 | | 17 |
| Staphylococcus pseudintermedius ED99 Cas9 | | 18 |
| Bifidobacterium bifidum S17 Cas9 | | 19 |
| Streptococcus sanguinis SK49 Cas9 | | 20 |
| Eubacterium yurii ATCC 43715 Cas9 | | 21 |
| Acidaminococcus sp. D21 Cas9 | | 22 |
| Lactobacillus farciminis KCTC 3681 Cas9 | | 23 |
| Mycoplasma synoviae 53 Cas9 | | 24 |
| Eubacterium dolichum DSM 3991 Cas9 | | 25 |
| Eubacterium rectale ATCC 33656 Cas9 | | 26 |
| Staphylococcus lugdunensis M23590 Cas9 | | 27 |
| Filifactor alocis ATCC 35896 Cas9 | | 28 |
| Planococcus antarcticus DSM 14505> Cas9 | | 29 |
| Catenibacterium mitsuokai DSM 15897 Cas9 | | 30 |
| Solobacterium moorei F0204 Cas9 | | 31 |
| Fructobacillus fructosus KCTC 3544 Cas9 | | 32 |
| Mycoplasma ovipneumoniae SC01 Cas9 | | 33 |
| Mycoplasma mobile 163K Cas9 | | 34 |
| Francisella novicida U112 Cas9 | | 35 |
| Parasutterella excrementihominis YIT 11859 Cas9 | | 36 |
| Legionella pneumophila str. Paris Cas9 | | 37 |
| Wolinella succinogenes DSM 1740 Cas9 | | 38 |
| gamma proteobacterium HTCC5015 Cas9 | | 39 |
| Sutterella wadsworthensis 3 1 45B Cas9 | | 40 |
| Campylobacter jejuni NCTC 11168 Cas9 | | 41 |
| Neisseria meningitidis Z2491 Cas9 | | 42 |
| Pasteurella multocida str. Pm70 Cas9 | | 43 |
| Bacteroides sp. 20 3 Cas9 | | 44 |
| Bacteroides fragilis NCTC 9343 Cas9 | | 45 |
| Bifidobacterium longum DJO10A Cas9 | | 46 |
| Bacillus smithii 7 3 47FAA Cas9 | | 47 |
| Methylosinus trichosporium OB3b Cas9 | | 48 |
| Alicycliphilus denitrificans K601 Cas9 | | 49 |
| Prevotella timonensis CRIS 5C-B1 Cas9 | | 50 |
| Roseburia inulinivorans DSM 16841 Cas9 | | 51 |
| Prevotella sp. C561 Cas9 | | 52 |
| Dinoroseobacter shibae DFL 12 DSM 16493 Cas9 | | 53 |
| Flavobacterium branchiophilum FL-15 Cas9 | | 54 |
| Elusimicrobium minutum Pei191 Cas9 | | 55 |
| Ignavibacterium album JCM 16511 Cas9 | | 56 |
| Odoribacter laneus YIT 1206 Cas9 | | 57 |
| Caenispirillum salinarum | | 58 |
| Porphyromonas sp. oral taxon 279 str. F0450> | | 59 |
| Cas9 | | |
| Actinomyces sp. oral taxon 180 str. F031 Cas9 | | 60 |
| Sphaerochaeta globosa str. Buddy Cas9 | | 61 |
| Rhodospirillum rubrum ATCC 11170 Cas9 | | 62 |
| Azospirillum sp. B510 Cas9 | | 63 |
| Nitrobacter hamburgensis X14 Cas9 | | 64 |
| Ruminococcus albus 8 Cas9 | | 65 |
| Barnesiella intestinihominis YIT 11860 Cas9 | | 66 |
| Alicyclobacillus hesperidum URH17-3-68 Cas9 | | 67 |
| Acidothermus cellulolyticus 11B Cas9 | | 68 |
| Acidovorax ebreus TPSY Cas9 | | 69 |
| Lactobacillus coryniformis KCTC 3535 Cas9 | | 70 |
| Bergeyella zoohelcum ATCC 43767 Cas9 | | 71 |
| Alcanivorax pacificus W11-5 Cas9 | | 72 |
| Akkermansia muciniphila ATCC BAA-835 Cas9 | | 73 |
| Ilyobacter polytropus DSM 2926 Cas9 | | 74 |
| Bradyrhizobium sp. BTAi1 Cas9 | | 75 |
| Ralstonia syzygii R24 Cas9 | | 76 |
| Treponema sp. JC4 Cas9 | | 77 |
| Wolinella succinogenes DSM 1740 Cas9 | | 78 |
| Rhodovulum sp. PH10 Cas9 | | 79 |
| Aminomonas paucivorans DSM 12260 Cas9 | | 80 |
| Parvibaculum lavamentivorans DS-1 Cas9 | | 81 |
| Puniceispirillum marinum IMCC1322 Cas9 | | 82 |
| Helicobacter mustelae 12198 Cas9 | | 83 |
| Clostridium cellulolyticum H10 Cas9 | | 84 |
| uncultured delta proteobacterium HF0070 07E19 | | 85 |
| Cas9 | | |
| Nitratifractor salsuginis DSM 16511 Cas9 | | 86 |
| Actinomyces coleocanis DSM 15436 Cas9 | | 87 |
| Novel nuclease domain-1 of Lapis Cas (FIG. 1) | | 88 |
| Cas9 HNH domain consensus (FIG. 1) | | 89 |
| Novel nuclease domain-2, subdomain-1 of Lapis | | 90 |
| Cas (FIG. 2) | | |
| Cas9 Ruvc domain, subdomain-1 consensus | | 91 |
| (FIG. 2) | | |
| Novel nuclease domain-2, subdomain-2 of Lapis | | 92 |
| Cas (FIG. 3) | | |
| Cas9 Ruvc domain subdomain-2 consensus | | 93 |
| (FIG. 3) | | |
| Novel nuclease domain-2, subdomain-3 of Lapis | | 94 |
| Cas (FIG. 4) | | |
| Cas9 Ruvc domain, subdomain-3 consensus | | 95 |
| (FIG. 4) | | |
| CRISPR-Cas locus of Lactobacillus apis | 96 | |
| comprising the Lapis cas gene | | |
| Cas gene ORF from Lactobacillus apis (referred to | 97 | |
| as Lapis cas) | | |
| CRISPR repeat consensus from the Lactobacillus | 98 | |
| apis CRISPR-Cas system | | |
| Putative tracrRNA encoding region | 99-109 | |
| putative tracrRNA region a, b, c, d, e, f, g, h, l, j, k | 110-120 | |
| antisense transcriptional simulation | | |
| Randomized PAM library targeting sequence T1 | 121 | |
| Lapis putative tracrRNA e with T7 initiation | 122 | |
| sequence and T1 targeting sequence | | |
| Lapis putative tracrRNA h withT7 initiation | 123 | |
| sequence and T1 targeting sequence | | |
| Lapis putative tracrRNA i withT7 initiation | 124 | |
| sequence and T1 targeting sequence | | |
| T7 transcribed Lapis putative tracrRNA e with T7 | 125 | |
| initiation sequence and T1 targeting sequence | | |
| T7 transcribed Lapis putative tracrRNA h withT7 | 126 | |
| initiation sequence and T1 targeting sequence | | |
| T7 transcribed Lapis putative tracrRNA i withT7 | 127 | |
| initiation sequence and T1 targeting sequence | | |
| chimeric engineered guide RNAs derived from | 128-138 | |
| putative tracrRNAs described herein | | |

### DETAILED DESCRIPTION

[0033] Compositions are provided for novel Cas systems and elements comprising such systems, including, but not limiting to, novel guide polynucleotide/Cas endonucleases complexes, single guide polynucleotides, guide RNA elements, and Cas endonucleases. The present disclosure further includes compositions and methods for genome modification of a target sequence in the genome of a cell, for gene editing, and for inserting a polynucleotide of interest into the genome of a cell.

[0034] The term “cas gene” herein refers to one or more genes that are generally coupled, associated or close to, or in the vicinity of flanking CRISPR loci. The terms “Cas gene”, “CRISPR-associated (Cas) gene” and “Clustered Regularly Interspaced Short Palindromic Repeats-associated gene” are used interchangeably herein.

[0035] CRISPR (clustered regularly interspaced short palindromic repeats) loci refers to certain genetic loci encoding components of DNA cleavage systems, for example, used by bacterial and archaeal cells to destroy foreign DNA (Horvath and Barrangou, 2010, Science 327:167-170; WO2007/025097, published Mar. 1, 2007). A CRISPR locus can consist of a CRISPR array, comprising short direct repeats (CRISPR repeats) separated by short variable DNA sequences (called ‘spacers’), which can be flanked by diverse Cas (CRISPR-associated) genes. The number of CRISPR-associated genes at a given CRISPR locus can vary between species. Multiple CRISPR/Cas systems have been described including Class 1 systems, with multisubunit effector complexes (comprising type I, type III and type IV subtypes), and Class 2 systems, with single protein effectors (comprising type II and type V subtypes, such as but not limiting to Cas9, Cpf1, C2c1, C2c2, C2c3). Class 1 systems (Makarova et al. 2015, Nature Reviews; Microbiology Vol. 13:1-15; Zetsche et al., 2015, Cell 163, 1-13; Shmakov et al., 2015, Molecular_Cell 60, 1-13; Haft et al., 2005, Computational Biology, PLoS Comput Biol 1(6): e60. doi:10.1371/journal.pcbi. 0010060 and WO 2013/176772 A1 published on Nov. 23, 2013 incorporated by reference herein). The type II CRISPR/Cas system from bacteria employs a crRNA (CRISPR RNA) and tracrRNA (trans-encoding CRISPR RNA) to guide the Cas endonuclease to its DNA target. The crRNA contains a spacer region complementary to one strand of the double strand DNA target and a region that base pairs with the tracrRNA (trans-encoding CRISPR RNA) forming a RNA duplex that directs the Cas endonuclease to cleave the DNA target. Spacers are acquired through a not fully understood process involving Cas1 and Cas2 proteins. All type II CRISPR/Cas loci contain cas1 and cas2 genes in addition to the cas9 gene (Chylinski et al., 2013, RNA Biology 10:726-737; Makarova et al. 2015, Nature Reviews Microbiology Vol. 13:1-15). Type II CRISR-Cas loci can encode a tracrRNA, which is partially complementary to the repeats within the respective CRISPR array, and can comprise other proteins such as Csn1 and Csn2. The presence of cas9 in the vicinity of Cas 1 and cas2 genes is the hallmark of type II loci (Makarova et al. 2015, Nature Reviews Microbiology Vol. 13:1-15).

[0036] The term “Cas protein” refers to a protein encoded by a Cas (CRISPR-associated) gene. A Cas protein includes a Cas9 protein, a Cpf1 protein, a C2c1 protein, a C2c2 protein, a C2c3 protein, Cas3, Cas3-HD, Cas 5, Cas7, Cas8, Cas10, or combinations or complexes of these (Makarova et al. 2015, Nature Reviews Microbiology Vol. 13:1-15, Shmakov et al. 2017. Nature Reviews 15:169-182). A Cas protein includes Cas endonucleases. Cas endonucleases, when in complex with a suitable polynucleotide component, are capable of recognizing, binding to, and optionally nicking, cleaving, or covalently attaching to all or part of a specific DNA target sequence. A Cas endonuclease described herein comprises one or more nuclease domains.

[0037] “Cas9” (formerly referred to as Cas5, Csn1, or Csx12) refers to a Cas endonuclease that forms a complex with a crRNA and a tracrRNA, or with a single guide polynucleotide, for specifically recognizing and cleaving all or part of a DNA target sequence. A Cas9 protein comprises a RuvC nuclease domain and an HNH (H—N—H) nuclease domain, each of which can cleave a single DNA strand at a target sequence (the concerted action of both domains leads to DNA double-strand cleavage, whereas activity of one domain leads to a nick). In general, the RuvC domain comprises subdomains I, II and III, where domain I is located near the N-terminus of Cas9 and subdomains II and III are located in the middle of the protein, flanking the HNH domain (Hsu et al., 2013, Cell 157:1262-1278). Cas9 endonucleases are typically derived from a type II CRISPR system, which includes a DNA cleavage system utilizing a Cas9 endonuclease in complex with at least one polynucleotide component. For example, a Cas9 can be in complex with a CRISPR RNA (crRNA) and a trans-activating CRISPR RNA (tracrRNA). In another example, a Cas9 can be in complex with a single guide RNA (Makarova et al. 2015, Nature Reviews Microbiology Vol. 13:1-15).

[0038] As described herein, a CRISPR locus (SEQ ID NO:96) comprising a previously unidentified Cas endonuclease nucleotide sequence (referred to as Lapis cas gene; SEQ ID NO: 97), encoding a Cas endonuclease (referred to as Lapis Cas endonuclease, SEQ ID NO: 1) containing previously undefined endonuclease domains was identified from Lactobacillus apis (referred to herein as Lapis). The Lapis Cas endonuclease described herein represents a novel Cas endonuclease lacking the signature residues of a Cas9 endonuclease HNH domain as well as lacking signature residues of a Cas9 endonuclease RuvC domain (FIGS. 1-4, Example 1). The novel Cas endonuclease described herein (Lapis Cas endonuclease) comprises two previously unidentified nuclease domains, wherein the first nuclease domain is a nuclease domain of SEQ ID NO: 88, and the second nuclease domain is a nuclease domain comprising three subdomains of SEQ ID NO: 90, SEQ ID NO: 92 and SEQ ID NO: 94, respectively. The Lapis Cas endonuclease can form a complex with a guide polynucleotide, in which the ability to recognize, bind to, and optionally nick or cleave (introduce a single or double-strand break in) a target site is retained.

[0039] A “functional fragment”, “fragment that is functionally equivalent” and “functionally equivalent fragment” of a Lapis Cas nuclease domain or a Lapis cas nuclease subdomain are used interchangeably herein, and refer to a portion or subsequence of the nuclease domain or subdomain of the present disclosure in which the ability to covalently attach to, recognize, bind to, and optionally nick or cleave (introduce a single or double-strand break in) the target site is retained.

[0040] Functional fragments of a Lapis Cas endonuclease include fragments comprising 50-100, 100-200, 100-300, 100-400, 100-500, 100-600, 100-700, 100-800, 100-900, 100-1000, 200-300, 200-400, 200-500, 200-600, 200-700, 200-800, 200-900, 200-1000, 300-400, 300-500, 300-600, 300-700, 300-800, 300-900, 300-1000, 400-500, 400-600, 400-700, 400-800, 400-900, 400-1000, 500-600, 500-700, 500-800, 500-900, 500-1000, 600-700, 600-800, 600-900, 600-1000, 700-800, 700-900, 700-1000, 800-900, 800-1000, 900-1000, 1000-1100, 1100-1200 or 1200-1300 amino acids of a reference Lapis Cas protein, such as the reference Lapis Cas endonuclease of the present disclosure of SEQ ID NO: 1.

[0041] A variant of the Lapis Cas protein (SEQ ID NO: 1) and corresponding Lapis Cas gene (SEQ ID NO: 97) described herein may be used, but should have specific binding activity, and optionally endonucleolytic activity, towards DNA when associated with an RNA component herein. Such a variant Lapis Cas proteins may comprise an amino acid sequence that is at least about 80%, 81%, 82%, 83%, 84%, 85%, 86%, 87%, 88%, 89%, 90%, 91%, 92%, 93%, 94%, 95%, 96%, 97%, 98%, or 99% identical to the amino acid sequence of the reference Cas endonuclease of SEQ ID NO: 1. A variant Lapis Cas gene may comprise a nucleotide sequence that is at least about 80%, 81%, 82%, 83%, 84%, 85%, 86%, 87%, 88%, 89%, 90%, 91%, 92%, 93%, 94%, 95%, 96%, 97%, 98%, or 99% identical to the Lapis Cas endonuclease nucleotide sequence of SEQ ID NO: 97.

[0042] A variant of the Lapis Cas endonuclease described herein can comprise at least one of two domains, or at least both domains, wherein the first nuclease domain is a nuclease domain of SEQ ID NO: 88 or a functional fragment of SEQ ID NO: 88, and the second nuclease domain is a nuclease domain comprising at least one nuclease subdomain selected from the group consisting of SEQ ID NO: 90, SEQ ID NO: 92 and SEQ ID NO: 94, or a functional fragment of the second domain. The variant Lapis Cas endonuclease of the present disclosure can form a complex with a guide polynucleotide, in which the ability to covalently attach to, recognize, bind to, and optionally nick or cleave (introduce a single or double-strand break in) the target site is retained.

[0043] Fragments and variants can be obtained via methods such as site-directed mutagenesis and synthetic construction. Methods for measuring endonuclease activity are well known in the art such as, but not limiting to, PCT/US13/39011, filed May 1, 2013, PCT/US16/32073 filed May 12, 2016, PCT/US16/32028 filed May 12, 2016, incorporated by reference herein).

[0044] Methods for determining if fragments and/or variants of a Lapis Cas endonuclease of the present disclosure are functional include methods that measure the endonuclease activity of the fragment or variant when in complex with a suitable polynucleotide. Methods that measure endonuclease activity are well known in the art such as, but not limiting to, PCT/US13/39011, filed May 1, 2013, PCT/US16/32073 filed May 12, 2016, PCT/US16/32028 filed May 12, 2016, incorporated by reference herein). Methods for measuring Lapis Cas endonuclease activity include methods that measure the mutation frequency at a target site after a double strand break has occurred.

[0045] Methods for measuring Lapis Cas endonuclease activity include methods that measure the mutation frequency at a target site after a double strand break has occurred. Methods for measuring if a functional fragment or functional variant of a Lapis Cas endonuclease of the present disclosure can make a double strand break include the following method: briefly, appropriate CRISPR-Lapis Cas maize genomic DNA target sites can be selected, a guide RNA transcriptional cassette (recombinant DNA that expresses a guide RNA) and a DNA recombinant construct expressing the Lapis Cas endonuclease of the present disclosure (or a functional fragment of the Lapis Cas endonuclease of the present disclosure, or a functional variant of the Lapis Cas endonuclease variant of the present disclosure endonuclease can be constructed and can be co-delivered by biolistic transformation into Hi-Type II 10-day-old immature maize embryos (IMEs) in the presence of BBM and WUS2 genes as described in Svitashev et al. (2015). A visual marker DNA expression cassette encoding a yellow fluorescent protein can also be co-delivered with the guide RNA transcriptional cassette and the Lapis Cas endonuclease expression cassette (recombinant DNA construct) to aid in the selection of evenly transformed IMEs. After 2 days, the 20-30 most evenly transformed IMEs can be harvested based on their fluorescence. Total genomic DNA is extracted and the DNA region surrounding the intended target site is PCR amplified with Phusion® HighFidelity PCR Master Mix (New England Biolabs, M0531L) adding on the sequences necessary for amplicon-specific barcodes and Illumnia sequencing and deep sequenced. The resulting reads are then examined for the presence of mutations at the expected site of cleavage by comparison to control experiments where the guide RNA transcriptional cassette was omitted from the transformation. If mutations are observed at the intended target sites when using a fragment or variant of the Lapis Cas endonuclease of the present disclosure, in complex with a suitable guide polynucleotide, the fragments or variants are functional.

[0046] Methods for measuring if a functional fragment of functional variant of a Lapis Cas endonuclease of the present disclosure can make a single strand break (also referred to as a nick; hence acts as a nickase) in the double stranded DNA target site include the following method: The cellular repair of chromosomal single-strand breaks (SSBs) in a double-stranded DNA target may be typically repaired seamlessly in plant cells such as maize. Therefore, to examine a functional Lapis Cas fragment or functional variant of a Lapis Cas for nicking activity, two chromosomal DNA target sites in close proximity (0-200 bp), each targeting a different strand (sense and anti-sense DNA strands) of the double-stranded DNA, can be targeted. If SSB activity is present, the SSB activity from both target sites will result in a DNA double-strand break (DSB) that will result in the production of insertion or deletion (indel) mutagenesis in maize cells. This outcome can then be used to detect and monitor the activity of the Lapis Cas nickase similar to that described in Karvelis et al. (2015). Briefly, appropriate CRISPR-Lapis Cas maize genomic DNA target sites are selected, guide RNA transcription cassettes and functional fragment Lapis Cas nicking expression cassettes are constructed and co-delivered by biolistic transformation into Hi-Type II 10-day-old immature maize embryos (IMEs) in the presence of BBM and WUS2 genes as described in Svitashev et al. (2015). Since particle gun transformation can be highly variable, a visual marker DNA expression cassette encoding a yellow fluorescent protein can also be co-delivered to aid in the selection of evenly transformed IMEs [immature maize embryos]. After 2 days, the 20-30 most evenly transformed IMEs are harvested based on their fluorescence, total genomic DNA extracted, the region surrounding the intended target site PCR amplified with Phusion® HighFidelity PCR Master Mix (New England Biolabs, M0531 L) adding on the sequences necessary for amplicon-specific barcodes and Illumnia sequencing and deep sequenced. The resulting reads are then examined for the presence of mutations at the expected site of cleavage by comparison to control experiments where the small RNA transcriptional cassette was omitted from the transformation.

[0047] Methods for measuring if a functional fragment of functional variant of a Lapis Cas endonuclease of the present disclosure can bind to the intended DNA target site include the following method: The binding of a maize chromosomal DNA target site does not result in either a single-stranded break (SSB) or a double-stranded break (DSB) in the double-stranded DNA target site. Therefore, to examine a functional Lapis Cas fragment for binding activity in maize cells, another nuclease domain (e.g. FokI) may be attached to the functional Lapis Cas fragment with binding activity. If binding activity is present, the added nuclease domain may be used to produce a DSB that will result in the production of insertion or deletion (indel) mutagenesis in maize cells. This outcome may then be used to detect and monitor the binding activity of a Lapis Cas similar to that described in Karvelis et al. (2015). Briefly, appropriate CRISPR-Lapis Cas maize genomic DNA target sites can be selected, guide RNA transcription cassettes and functional fragment Lapis Cas binding and nuclease attached expression cassettes can be constructed and co-delivered by biolistic transformation into Hi-Type II 10-day-old immature maize embryos (IMEs) in the presence of BBM and WUS2 genes as described in Svitashev et al. (2015). A visual marker DNA expression cassette encoding a yellow fluorescent protein can also be co-delivered to aid in the selection of evenly transformed IMEs [immature maize embryos]. After 2 days, the 20-30 most evenly transformed IMEs can be harvested based on their fluorescence, total genomic DNA extracted, the region surrounding the intended target site PCR amplified with Phusion® HighFidelity PCR Master Mix (New England Biolabs, M0531 L) adding on the sequences necessary for amplicon-specific barcodes and Illumnia sequencing and deep sequenced. The resulting reads can then be examined for the presence of mutations at the expected site of cleavage by comparison to control experiments where the small RNA transcriptional cassette was omitted from the transformation.

[0048] Alternatively, the binding activity of maize chromosomal DNA target sites can be monitored by the transcriptional induction or repression of a gene. This can be accomplished by attaching a transcriptional activation or repression domain to the functional Lapis Cas binding fragment and targeting it to the promoter region of a gene and binding monitored through an increase in accumulation of the gene transcript or protein. The gene targeted for either activation or repression can be any naturally occurring maize gene or engineered gene (e.g. a gene encoded a red fluorescent protein) introduced into the maize genome by methods known in the art (e.g. particle gun or agrobacterium transformation).

[0049] Cas endonucleases, including the Lapis Cas endonuclease described herein, can be used for targeted genome editing (via simplex and multiplex double-strand breaks and nicks) and targeted genome regulation (via tethering of epigenetic effector domains to either the Cas protein or sgRNA. A Cas endonuclease can also be engineered to function as an RNA-guided recombinase, and via RNA tethers could serve as a scaffold for the assembly of multiprotein and nucleic acid complexes (Mali et al., 2013, Nature Methods Vol. 10: 957-963).

[0050] The term “plant-optimized Lapis Cas endonuclease” herein refers to a Lapis Cas protein encoded by a nucleotide sequence that has been optimized for expression in a plant cell or plant.

[0051] The Lapis Cas protein, or functional fragment thereof, for use in the disclosed methods, can be isolated from a recombinant source where the genetically modified host cell (e.g. an insect cell or a yeast cell or human-derived cell line) is modified to express the nucleic acid sequence encoding the Cpf1 protein. Alternatively, the Lapis Cas protein can be produced using cell free protein expression systems or be synthetically produced.

[0052] A “plant-optimized nucleotide sequence encoding a Lapis Cas endonuclease”, “plant-optimized construct encoding a Lapis Cas endonuclease” and a “plant-optimized polynucleotide encoding a Lapis Cas” are used interchangeably herein and refer to a nucleotide sequence encoding an Lapis Cas protein, or a variant or functional fragment thereof, that has been optimized for expression in a plant cell or plant. A plant comprising a plant-optimized Lapis Cas endonuclease includes a plant comprising the nucleotide sequence encoding for the Lapis Cas sequence and/or a plant comprising the Lapis Cas endonuclease protein. In one aspect, the plant-optimized Lapis Cas endonuclease nucleotide sequence is a maize-optimized, rice-optimized, wheat-optimized or soybean-optimized Lapis Cas endonuclease.

[0053] The Cas endonuclease, including the Lapis Cas endonuclease described herein, can comprise a modified form of the Cas polypeptide. The modified form of the Cas polypeptide can include an amino acid change (e.g., deletion, insertion, or substitution) that reduces the naturally-occurring nuclease activity of the Cas protein. For example, in some instances, the modified form of the Cas protein has less than 50%, less than 40%, less than 30%, less than 20%, less than 10%, less than 5%, or less than 1% of the nuclease activity of the corresponding wild-type Cas polypeptide (US patent application US20140068797 A1, published on Mar. 6, 2014). In some cases, the modified form of the Cas polypeptide has no substantial nuclease activity and is referred to as catalytically “inactivated Cas” or “deactivated Cas (dCas).” An inactivated Cas/deactivated Cas includes a deactivated Lapis Cas endonuclease (Lapis dCas).

[0054] A catalytically inactive Lapis Cas can be fused to a heterologous sequence as described herein.

[0055] The terms “functional fragment”, “fragment that is functionally equivalent” and “functionally equivalent fragment” of a Cas endonuclease are used interchangeably herein, and refer to a portion or subsequence of the Cas endonuclease sequence, including the Lapis Cas endonuclease of the present disclosure in which the ability to covalently attach to, recognize, bind to, and optionally nick or cleave (introduce a single or double-strand break in) the target site is retained.

[0056] The terms “functional variant”, “Variant that is functionally equivalent” and “functionally equivalent variant” of a Cas endonuclease, including the Lapis Cas endonuclease of the present disclosure, are used interchangeably herein, and refer to a variant of the Cas endonuclease of the present disclosure in which the ability to recognize, bind to, and optionally nick or cleave (introduce a single or double-strand break in) the target site is retained. Fragments and variants can be obtained via methods such as site-directed mutagenesis and synthetic construction.

[0057] A Lapis Cas protein, such as the Lapis Cas endonuclease described herein, can comprise at least one heterologous nuclear localization sequence (NLS). A heterologous NLS amino acid sequence herein may be of sufficient strength to drive accumulation of the Lapis Cas protein described herein, in a detectable amount in the nucleus of a eukaryotic cell. An NLS may comprise one (monopartite) or more (e.g., bipartite) short sequences (e.g., 2 to 20 residues) of basic, positively charged residues (e.g., lysine and/or arginine), and can be located anywhere in a Cas amino acid sequence but such that it is exposed on the protein surface. An NLS may be operably linked to the N-terminus or C-terminus of a Cas protein herein, for example. Two or more NLS sequences can be linked to a Cas protein, for example, such as on both the N- and C-termini of a Cas protein. The Cas endonuclease gene can be operably linked to a SV40 nuclear targeting signal upstream of the Cas codon region and a bipartite VirD2 nuclear localization signal (Tinland et al. (1992) Proc. Natl. Acad. Sci. USA 89:7442-6) downstream of the Cas codon region. Non-limiting examples of suitable NLS sequences herein include the Simian virus 40 (SV40) NLS, a Penetratin, a bipartite NLS or the RNP A1 NLS (M9 region), or endogenous NLSs as disclosed in U.S. Pat. Nos. 6,660,830 and 7,309,576, which are both incorporated by reference herein.

[0058] Conventional NLSs are short peptide sequences that facilitate nuclear localization of the proteins containing them (see for example, Human a1 T-ag, CBP80, DNA helicase Q1, BRCA1, Mitosin, Myc, NF-kB p50, NF-kB p65, H1V1422, HIV1423, Human a2 T-ag, NF-kB p50, DNA helicase Q1, LEF-1, EBNA1, HIV-1 IN, HIV-1 MA, H1V1422, HIV1423, RCP 4.1R, Human a3 T-ag, DNA helicase 01, tTS, Human a4 T-ag, Mouse a1 LEF-1, Mouse a2, T-agáCK2 site, Impa-P1) T-ag, N1N2, RB, Dorsal áPK\check{}A site, CBP80, DNA helicase Q1, LEF-1, Mouse a2, T-agáCK2, Impa-P1) T-ag, N1N2, RB, Dorsal áPK{hacek over 0}A, CBP80, DNA helicase Q1, LEF-1, Xenopus a1 T-ag, Nucleoplasmin, Yeast a1 T-ag, (SRP1, Kap60), T-agáCK2, N1N2, HIV-1 IN, Plant a1 T-ag, T-agáCK2, Opaque-2, R Protein (Maize), N1N2, RAG-1, RCP, RB, STAT, CBP80, LEF, EBNA, IN, tTG, tissue ICP, described inTable 1 of U.S. Pat. No. 7,309,576, incorporated by reference herein, and Jans et al., 2000, BioEssays 22:532-544). Any NLS may be employed in the methods described herein. Nucleotide sequences encoding a selected NLS may be derived from the amino acid sequence of the NLS and are synthesized and incorporated into the nucleotide sequence encoding the Cas endonuclease described herein by conventional methods.

[0059] A Cas protein herein such as a Lapis Cas protein can comprise a heterologous nuclear localization sequence (NLS) on either or both N- and C-terminus as well as a N-terminal or C-terminal tag such as but not limiting to a N-terminal 6×His Tag. N-terminal or C-terminal tags can be used for purification of the Cas endonuclease protein described herein.

[0060] A Cas protein, including the Lapis Cas endonuclease described herein, can be part of a fusion protein comprising one or more heterologous protein domains (e.g., 1, 2, 3, or more domains in addition to the Cas protein). Such a fusion protein may comprise any additional protein sequence, and optionally a linker sequence between any two domains, such as between Cas and a first heterologous domain. Examples of protein domains that may be fused to a Cas protein herein include, without limitation, epitope tags (e.g., histidine [His], V5, FLAG, influenza hemagglutinin [HA], myc, VSV-G, thioredoxin [Trx]), reporters (e.g., glutathione-5-transferase [GST], horseradish peroxidase [HRP], chloramphenicol acetyltransferase [CAT], beta-galactosidase, beta-glucuronidase [GUS], luciferase, green fluorescent protein [GFP], HcRed, DsRed, cyan fluorescent protein [CFP], yellow fluorescent protein [YFP], blue fluorescent protein [BFP]), and domains having one or more of the following activities: methylase activity, demethylase activity, transcription activation activity (e.g., VP16 or VP64), transcription repression activity, transcription release factor activity, histone modification activity, RNA cleavage activity and nucleic acid binding activity. A Cas protein can also be in fusion with a protein that binds DNA molecules or other molecules, such as maltose binding protein (MBP), S-tag, Lex A DNA binding domain (DBD), GAL4A DNA binding domain, and herpes simplex virus (HSV) VP16.

[0061] A catalytically inactive Cas, including a catalytically inactive Lapis Cas endonuclease, can be fused to a heterologous sequence (US patent application US20140068797 A1, published on Mar. 6, 2014). Suitable fusion partners include, but are not limited to, a polypeptide that provides an activity that indirectly increases transcription by acting directly on the target DNA or on a polypeptide (e.g., a histone or other DNA-binding protein) associated with the target DNA. Additional suitable fusion partners include, but are not limited to, a polypeptide that provides for methyltransferase activity, demethylase activity, acetyltransferase activity, deacetylase activity, kinase activity, phosphatase activity, ubiquitin ligase activity, deubiquitinating activity, adenylation activity, deadenylation activity, SUMOylating activity, deSUMOylating activity, ribosylation activity, deribosylation activity, myristoylation activity, or demyristoylation activity. Further suitable fusion partners include, but are not limited to, a polypeptide that directly provides for increased transcription of the target nucleic acid (e.g., a transcription activator or a fragment thereof, a protein or fragment thereof that recruits a transcription activator, a small molecule/drug-responsive transcription regulator, etc.). A catalytically inactive Cas9 can also be fused to a FokI nuclease to generate double-strand breaks (Guilinger et al. Nature biotechnology, volume 32, number 6, June 2014).

[0062] As used herein, the term “guide polynucleotide”, relates to a polynucleotide sequence that can form a complex with a Cas endonuclease, including the Lapis Cas endonuclease described herein, and enables the Cas endonuclease to recognize, bind to, and optionally nick, cleave, or covalently attach to a DNA target site. The guide polynucleotide sequence can be a RNA sequence, a DNA sequence, or a combination thereof (a RNA-DNA combination sequence). Optionally, the guide polynucleotide can comprise at least one nucleotide, phosphodiester bond or linkage modification such as, but not limited, to Locked Nucleic Acid (LNA), 5-methyl dC, 2,6-Diaminopurine, 2′-Fluoro A, 2′-Fluoro U, 2′-O-Methyl RNA, phosphorothioate bond, linkage to a cholesterol molecule, linkage to a polyethylene glycol molecule, linkage to a spacer 18 (hexaethylene glycol chain) molecule, or 5′ to 3′ covalent linkage resulting in circularization. A guide polynucleotide that solely comprises ribonucleic acids is also referred to as a “guide RNA” or “gRNA” (See also U.S. Patent Application US20150082478, published on Mar. 19, 2015 and US20150059010, published on Feb. 26, 2015, both are incorporated by reference herein).

[0063] The guide polynucleotide comprises a first nucleotide sequence domain that is recognized by a Cas endonuclease (such as a Lapis Cas endonuclease), referred to as Cas endonuclease recognition domain (CER domain; Lapis Cas recognition domain for Lapis Cas endonucleases) and a Variable Targeting domain or VT domain that can hybridize to a nucleotide sequence in a target DNA. By “domain” it is meant a contiguous stretch of nucleotides that can be RNA, DNA, or a RNA-DNA-combination sequence. The VT domain and/or the CER domain of a guide polynucleotide can comprise a RNA sequence, a DNA sequence, or a RNA-DNA-combination sequence. The guide polynucleotide may be referred to as “guide RNA” (when composed of a contiguous stretch of RNA nucleotides) or “guide DNA” (when composed of a contiguous stretch of DNA nucleotides) or “guide RNA-DNA” (when composed of a combination of RNA and DNA nucleotides). In one aspect, the guide polynucleotide can form a complex with a Lapis Cas endonuclease, wherein said guide polynucleotide/Lapis Cas endonuclease complex (also referred to as a guide polynucleotide/Lapis Cas endonuclease system) can direct the Lapis Cas endonuclease to a genomic target site, enabling the Lapis Cas endonuclease to recognize, bind to, and optionally nick or cleave (introduce a single or double-strand break) the target site. The guide polynucleotide includes a chimeric engineered guide RNA. The term “chimeric engineered guide RNA” relates to a polynucleotide sequence that is engineered to comprise regions that are not found together in nature (i.e., they are heterologous with each other) and can form a complex with a Cas endonuclease, including the Lapis Cas endonuclease described herein, and enables the Cas endonuclease to recognize, bind to, and optionally nick, cleave, or covalently attach to a DNA target site. For example, a chimeric engineered guide RNA can be engineered to comprise a first RNA nucleotide sequence domain (referred to as Variable Targeting domain or VT domain) that can hybridize to a nucleotide sequence in a target DNA, linked to a second RNA nucleotide sequence that can be recognized by the Lapis Cas endonuclease (such as the putative tracrRNA like sequences described herein), such that the first and second nucleotide sequence are not found linked together in nature.

[0064] The guide polynucleotide, capable of directing the Lapis Cas endonuclease to a target sequence, contains a nucleotide sequence with homology to a DNA target sequence (also referred to as a variable targeting domain) 5 prime to any one of the putative tracrRNAs described herein (Example 2). Examples of such chimeric engineered guide RNAs are shown in SEQ ID NOs: 128-138 where N may be any nucleotide and wherein the 5 prime sequence of Ns can vary from 12, 13, 14, 15, 16, 17, 18, 19, 20, 21, 22, 23, 24, 25, 26, 27, 28, 29 or 30 in length. As shown in FIGS. 6-16, the putative tracrRNAs contained a CRISPR repeat-like sequence, a loop sequence that promoted self-folding, an anti-repeat-like sequence with partial complementation to the repeat sequence, and a 3 prime region with tracrRNA hairpin-like secondary structures.

[0065] The term “variable targeting domain” or “VT domain” is used interchangeably herein and includes a nucleotide sequence that can hybridize (is complementary) to one strand (nucleotide sequence) of a double strand DNA target site. The % complementation between the first nucleotide sequence domain (VT domain) and the target sequence can be at least 50%, 51%, 52%, 53%, 54%, 55%, 56%, 57%, 58%, 59%, 60%, 61%, 62%, 63%, 63%, 65%, 66%, 67%, 68%, 69%, 70%, 71%, 72%, 73%, 74%, 75%, 76%, 77%, 78%, 79%, 80%, 81%, 82%, 83%, 84%, 85%, 86%, 87%, 88%, 89%, 90%, 91%, 92%, 93%, 94%, 95%, 96%, 97%, 98%, 99% or 100%. The variable targeting domain can be at least 12, 13, 14, 15, 16, 17, 18, 19, 20, 21, 22, 23, 24, 25, 26, 27, 28, 29 or 30 nucleotides in length. In some embodiments, the variable targeting domain comprises a contiguous stretch of 12 to 30 nucleotides. The variable targeting domain can be composed of a DNA sequence, a RNA sequence, a modified DNA sequence, a modified RNA sequence, or any combination thereof.

[0066] The variable targeting domain replaces the spacer sequence normally found in the native Lapis CRISPR locus (SEQ ID NO: 96).

[0067] In some embodiments, the variable targeting domain comprises a contiguous stretch of 12 to 30, 12 to 29, 12 to 28, 12 to 27, 12 to 26, 12 to 25, 12 to 26, 12 to 25, 12 to 24, 12 to 23, 12 to 22, 12 to 21, 12 to 20, 12 to 19, 12 to 18, 12 to 17, 12 to 16, 12 to 15, 12 to 14, 12 to 13, 13 to 30, 13 to 29, 13 to 28, 13 to 27, 13 to 26, 13 to 25, 13 to 26, 13 to 25, 13 to 24, 13 to 23, 13 to 22, 13 to 21, 13 to 20, 13 to 19, 13 to 18, 13 to 17, 13 to 16, 13 to 15, 13 to 14, 14 to 30, 14 to 29, 14 to 28, 14 to 27, 14 to 26, 14 to 25, 14 to 26, 14 to 25, 14 to 24, 14 to 23, 14 to 22, 14 to 21, 14 to 20, 14 to 19, 14 to 18, 14 to 17, 14 to 16, 14 to 15, 15 to 30, 15 to 29, 15 to 28, 15 to 27, 15 to 26, 15 to 25, 15 to 26, 15 to 25, 15 to 24, 15 to 23, 15 to 22, 15 to 21, 15 to 20, 15 to 19, 15 to 18, 15 to 17, 15 to 16, 16 to 30, 16 to 29, 16 to 28, 16 to 27, 16 to 26, 16 to 25, 16 to 24, 16 to 23, 16 to 22, 16 to 21, 16 to 20, 16 to 19, 16 to 18, 16 to 17, 17 to 30, 17 to 29, 17 to 28, 17 to 27, 17 to 26, 17 to 25, 17 to 24, 17 to 23, 17 to 22, 17 to 21, 17 to 20, 17 to 19, 17 to 18, 18 to 30, 18 to 29, 18 to 28, 18 to 27, 18 to 26, 18 to 25, 18 to 24, 18 to 23, 18 to 22, 18 to 21, 18 to 20, 18 to 19, 19 to 30, 19 to 29, 19 to 28, 19 to 27, 19 to 26, 19 to 25, 19 to 24, 19 to 23, 19 to 22, 19 to 21, 19 to 20, 20 to 30, 20 to 29, 20 to 28, 20 to 27, 20 to 26, 20 to 25, 20 to 24, 20 to 23, 20 to 22, 20 to 21, 21 to 30, 21 to 29, 21 to 28, 21 to 27, 21 to 26, 21 to 25, 21 to 24, 21 to 23, 21 to 22, 22 to 30, 22 to 29, 22 to 28, 22 to 27, 22 to 26, 22 to 25, 22 to 24, 22 to 23, 23 to 30, 23 to 29, 23 to 28, 23 to 27, 23 to 26, 23 to 25, 23 to 24, 24 to 30, 24 to 29, 24 to 28, 24 to 27, 24 to 26, 24 to 25, 25 to 30, 25 to 29, 25 to 28, 25 to 27, 25 to 26, 26 to 30, 26 to 29, 26 to 28, 26 to 27, 27 to 30, 27 to 29, 27 to 28, 28 to 30, 28 to 29, or 29 to 30 nucleotides.

[0068] The variable targeting domain can be composed of a DNA sequence, a RNA sequence, a modified DNA sequence, a modified RNA sequence, a RNA-DNA combination sequence, or any combination thereof.

[0069] The terms “functional fragment”, “fragment that is functionally equivalent” and “functionally equivalent fragment” of a guide RNA or putative tracrRNA are used interchangeably herein, and refer to a portion or subsequence of the guide RNA or putative tracrRNA, respectively, of the present disclosure in which the ability to function as a guide RNA or putative tracrRNA, respectively, is retained.

[0070] The terms “functional variant”, “Variant that is functionally equivalent” and “functionally equivalent variant” of a guide RNA or putative tracrRNA (respectively) are used interchangeably herein, and refer to a variant of the guide RNA or putative tracrRNA, respectively, of the present disclosure in which the ability to function as a guide RNA or putative tracrRNA, respectively, is retained.

[0071] The guide polynucleotide can be produced by any method known in the art, including chemically synthesizing guide polynucleotides (such as but not limiting to Hendel et al. 2015, Nature Biotechnology 33, 985-989), in vitro generated guide polynucleotides, and/or self-splicing guide RNAs (such as but not limiting to Xie et al. 2015, PNAS 112:3570-3575).

[0072] A functional fragments of a guide RNA or guide polynucleotide of the present disclosure include a fragment of 20-40, 20-45, 20-50, 20-55, 20-60, 20-65, 20-70, 20-75, 20-80, 25-40, 25-45, 25-50, 25-55, 25-60, 25-65, 25-70, 25-75, 25-80, 30-40, 30-45, 30-50, 30-55, 30-60, 30-65, 30-70, 30-75, 30-80, 35-40, 35-45, 35-50, 35-55, 35-60, 35-65, 35-70, 35-75, 35-80, 40-45, 40-50, 40-55, 40-60, 40-65, 40-70, 40-75, 40-80, 45-50, 45-55, 45-60, 45-65, 45-70, 45-75, 45-80, 50-55, 50-60, 50-65, 50-70, 50-75, 50-80, 55-55, 55-60, 55-65, 55-70, 55-75, 55-80, 60-65, 60-70, 60-75, 60-80, 65-70, 65-75, 65-80, 70-75, 70-80 or 75-80 nucleotides of a reference guide RNA, such as the reference guide RNAs of SEQ ID NOs: 128-138.

[0073] A functional variant of a single guide RNA may comprise a nucleotide sequence that is at least about 60%, 65%, 70%, 75%, 80%, 81%, 82%, 83%, 84%, 85%, 86%, 87%, 88%, 89%, 90%, 91%, 92%, 93%, 94%, 95%, 96%, 97%, 98%, or 99% identical to reference single guide RNA, such as the reference single guide RNA of SEQ ID NOs: 128-138, described herein. In some embodiments, a functional variant of a single guide RNA comprises a nucleotide sequence having at least about 60%, at least about 65%, at least about 70%, at least about 75%, at least about 80%, at least about 85%, at least about 90%, at least about 95%, at least about 98%, at least about 99%, or 100% nucleotide sequence identity over a stretch of at least 8, 9, 10, 11, 12, 13, 14, 15, 16, 17, 18, 19, 20, 21, 22, 23, 24, 25, 26, 27, 28, 29, 30 contiguous nucleotides to any one of the nucleotide sequences set forth in SEQ ID NOs: 128-138.

[0074] Nucleotide sequence modification of the guide polynucleotide, can be selected from, but not limited to, the group consisting of a 5′ cap, a 3′ polyadenylated tail, a riboswitch sequence, a stability control sequence, a sequence that forms a dsRNA duplex, a modification or sequence that targets the guide poly nucleotide to a subcellular location, a modification or sequence that provides for tracking, a modification or sequence that provides a binding site for proteins, a Locked Nucleic Acid (LNA), a 5-methyl dC nucleotide, a 2,6-Diaminopurine nucleotide, a 2′-Fluoro A nucleotide, a 2′-Fluoro U nucleotide; a 2′-0-Methyl RNA nucleotide, a phosphorothioate bond, linkage to a cholesterol molecule, linkage to a polyethylene glycol molecule, linkage to a spacer 18 molecule, a 5′ to 3′ covalent linkage, or any combination thereof. These modifications can result in at least one additional beneficial feature, wherein the additional beneficial feature is selected from the group of a modified or regulated stability, a subcellular targeting, tracking, a fluorescent label, a binding site for a protein or protein complex, modified binding affinity to complementary target sequence, modified resistance to cellular degradation, and increased cellular permeability.

[0075] The terms “5′-cap” and “7-methylguanylate (m⁷G) cap” are used interchangeably herein. A 7-methylguanylate residue is located on the 5′ terminus of messenger RNA (mRNA) in eukaryotes. RNA polymerase II (Pol II) transcribes mRNA in eukaryotes. Messenger RNA capping occurs generally as follows: The most terminal 5′ phosphate group of the mRNA transcript is removed by RNA terminal phosphatase, leaving two terminal phosphates. A guanosine monophosphate (GMP) is added to the terminal phosphate of the transcript by a guanylyl transferase, leaving a 5′-5′ triphosphate-linked guanine at the transcript terminus. Finally, the 7-nitrogen of this terminal guanine is methylated by a methyl transferase.

[0076] The terminology “not having a 5′-cap” herein is used to refer to RNA having, for example, a 5′-hydroxyl group instead of a 5′-cap. Such RNA can be referred to as “uncapped RNA”, for example. Uncapped RNA can better accumulate in the nucleus following transcription, since 5′-capped RNA is subject to nuclear export. One or more RNA components herein are uncapped.

[0077] As used herein, the terms “guide polynucleotide/Cas endonuclease complex”, “guide polynucleotide/Cas endonuclease system”, “guide polynucleotide/Cas complex”, “guide polynucleotide/Cas system” and “guided Cas system” “Polynucleotide-guided endonuclease”, “PGEN” are used interchangeably herein and refer to at least one guide polynucleotide (such as a chimeric engineered guide RNA described herein) and at least one Cas endonuclease that are capable of forming a complex, wherein said guide polynucleotide/Cas endonuclease complex can direct the Cas endonuclease to a DNA target site, enabling the Cas endonuclease to recognize, bind to, and optionally nick, cleave (introduce a single or double-strand break), or covalently attach to the DNA target site. A Cas endonuclease unwinds the DNA duplex at the target sequence and optionally cleaves at least one DNA strand, as mediated by recognition of the target sequence by a polynucleotide that is in complex with the Cas protein. Such recognition and cutting of a target sequence by a Cas endonuclease typically occurs if the correct protospacer-adjacent motif (PAM) is located at or adjacent to the 3′ end of the DNA target sequence. Alternatively, a Cas protein herein may lack DNA cleavage or nicking activity, but can still specifically bind to a DNA target sequence when complexed with a suitable RNA component. (See also U.S. Patent Application US20150082478, published on Mar. 19, 2015 and US20150059010, published on Feb. 26, 2015, both are incorporated by reference herein).

[0078] A guide polynucleotide/Cas endonuclease complex includes a guide RNA/Cas endonuclease complex comprising at least one chimeric engineered guide RNA and a Cas endonuclease, wherein said Cas endonuclease comprises a first nuclease domain of SEQ ID NO: 88 or a functional fragment of SEQ ID NO: 88, and a second nuclease domain comprising at least one nuclease subdomain selected from the group consisting of SEQ ID NO: 90, SEQ ID NO: 92 and SEQ ID NO: 94, or a functional fragment of said second domain, wherein said guide RNA/Cas endonuclease complex is capable of recognizing, binding to, and optionally nicking, cleaving, or covalently attaching to all or part of a target sequence.

[0079] A guide polynucleotide/Cas endonuclease complex includes a guide RNA/Cas endonuclease complex comprising a Cas endonuclease of SEQ ID NO: 1, or a functional fragment thereof, and at least one chimeric engineered guide RNA, wherein said guide RNA/Cas endonuclease complex is capable of recognizing, binding to, and optionally nicking, cleaving, or covalently attaching to all or part of a target sequence

[0080] A guide polynucleotide/Cas endonuclease complex includes a guide RNA/Cas endonuclease complex comprising at least one chimeric engineered guide RNA and a Cas endonuclease, wherein said Cas endonuclease is encoded by a eukaryotic codon optimized sequence of SEQ ID NO: 97, wherein said guide RNA/Cas endonuclease complex is capable of recognizing, binding to, and optionally nicking, cleaving, or covalently attaching to all or part of a target sequence.

[0081] A guide polynucleotide/Cas endonuclease complex, including a guide polynucleotide/Lapis Cas endonuclease complex described herein, can cleave one or both strands of a DNA target sequence.

[0082] A guide polynucleotide/Cas endonuclease complex that can cleave both strands of a DNA target sequence typically comprises a Cas protein that has all of its endonuclease domains in a functional state (e.g., wild type endonuclease domains or variants thereof retaining some or all activity in each endonuclease domain).

[0083] A guide polynucleotide/Cas endonuclease complex that can cleave one strand of a DNA target sequence can be characterized herein as having nickase activity (e.g., partial cleaving capability). A Cas nickase typically comprises one functional endonuclease domain that allows the Cas to cleave only one strand (i.e., make a nick) of a DNA target sequence. A pair of Cas nickases can be used to increase the specificity of DNA targeting. In general, this can be done by providing two Cas nickases that, by virtue of being associated with RNA components with different guide sequences, target and nick nearby DNA sequences on opposite strands in the region for desired targeting. Such nearby cleavage of each DNA strand creates a double-strand break (i.e., a DSB with single-stranded overhangs), which is then recognized as a substrate for non-homologous-end-joining, NHEJ (prone to imperfect repair leading to mutations) or homologous recombination, HR. Each nick in these embodiments can be at least about 5, 10, 15, 20, 30, 40, 50, 60, 70, 80, 90, or 100 (or any integer between 5 and 100) bases apart from each other, for example. One or two Cas nickase proteins herein can be used in a Cas nickase pair. A guide polynucleotide/Cas endonuclease complex in certain embodiments can bind to a DNA target site sequence, but does not cleave any strand at the target site sequence. Such a complex may comprise a Cas protein in which all of its nuclease domains are mutant, dysfunctional. A Cas protein that binds, but does not cleave, a target DNA sequence can be used to modulate gene expression, for example, in which case the Cas protein could be fused with a transcription factor (or portion thereof) (e.g., a repressor or activator, such as any of those disclosed herein).

[0084] The terms “guide RNA/Cas endonuclease complex”, “guide RNA/Cas endonuclease system”, “guide RNA/Cas complex”, “guide RNA/Cas system”, “gRNA/Cas complex”, “g RNA/Cas system”, “RNA-guided endonuclease”, “RGEN” are used interchangeably herein and refer to at least one RNA component and at least one Cas endonuclease that are capable of forming a complex, wherein said guide RNA/Cas endonuclease complex can direct the Cas endonuclease, including the Lapis Cas endonuclease described herein, to a DNA target site, enabling the Cas endonuclease to covalently attach to, recognize, bind to, and optionally nick or cleave (introduce a single or double-strand break) the DNA target site.

[0085] The present disclosure further provides expression constructs for expressing in a prokaryotic or eukaryotic cell/organism a guide RNA/Cas system that is capable of binding to and creating a double-strand break in a target site. In one embodiment, the expression constructs of the disclosure comprise a promoter operably linked to a nucleotide sequence encoding a Lapis Cas gene (or plant or mammalian optimized Lapis Cas gene) and a promoter operably linked to a guide RNA of the present disclosure. The promoter is capable of driving expression of an operably linked nucleotide sequence in a prokaryotic or eukaryotic cell/organism.

[0086] The terms “target site”, “target sequence”, “target site sequence, “target DNA”, “target locus”, “genomic target site”, “genomic target sequence”, “genomic target locus” and “protospacer”, are used interchangeably herein and refer to a polynucleotide sequence such as, but not limited to, a nucleotide sequence on a chromosome, episome, a transgenic locus, or any other DNA molecule in the genome (including chromosomal, choloroplastic, mitochondrial DNA, plasmid DNA) of a cell, at which a guide polynucleotide/Cas endonuclease complex can recognize, bind to, and optionally nick or cleave. The target site can be an endogenous site in the genome of a cell, or alternatively, the target site can be heterologous to the cell and thereby not be naturally occurring in the genome of the cell, or the target site can be found in a heterologous genomic location compared to where it occurs in nature. As used herein, terms “endogenous target sequence” and “native target sequence” are used interchangeable herein to refer to a target sequence that is endogenous or native to the genome of a cell and is at the endogenous or native position of that target sequence in the genome of the cell. An “artificial target site” or “artificial target sequence” are used interchangeably herein and refer to a target sequence that has been introduced into the genome of a cell. Such an artificial target sequence can be identical in sequence to an endogenous or native target sequence in the genome of a cell but be located in a different position (i.e., a non-endogenous or non-native position) in the genome of a cell.

[0087] An “altered target site”, “altered target sequence”, “modified target site”, “modified target sequence” are used interchangeably herein and refer to a target sequence as disclosed herein that comprises at least one alteration when compared to non-altered target sequence. Such “alterations” include, for example: (i) replacement of at least one nucleotide, (ii) a deletion of at least one nucleotide, (iii) an insertion of at least one nucleotide, or (iv) any combination of (i)-(iii).

[0088] Methods for “modifying a target site” and “altering a target site” are used interchangeably herein and refer to methods for producing an altered target site.

[0089] The length of the target DNA sequence (target site) can vary, and includes, for example, target sites that are at least 12, 13, 14, 15, 16, 17, 18, 19, 20, 21, 22, 23, 24, 25, 26, 27, 28, 29, 30 or more nucleotides in length. It is further possible that the target site can be palindromic, that is, the sequence on one strand reads the same in the opposite direction on the complementary strand. The nick/cleavage site can be within the target sequence or the nick/cleavage site could be outside of the target sequence. In another variation, the cleavage could occur at nucleotide positions immediately opposite each other to produce a blunt end cut or, in other cases, the incisions could be staggered to produce single-stranded overhangs, also called “sticky ends”, which can be either 5′ overhangs, or 3′ overhangs. Active variants of genomic target sites can also be used. Such active variants can comprise at least 65%, 70%, 75%, 80%, 85%, 90%, 91%, 92%, 93%, 94%, 95%, 96%, 97%, 98%, 99% or more sequence identity to the given target site, wherein the active variants retain biological activity and hence are capable of being recognized and cleaved by an Cas endonuclease.

[0090] Assays to measure the single or double-strand break of a target site by an endonuclease are known in the art and generally measure the overall activity and specificity of the agent on DNA substrates containing recognition sites.

[0091] A “protospacer adjacent motif” (PAM) herein refers to a short nucleotide sequence adjacent to a target sequence (protospacer) that is recognized (targeted) by a guide polynucleotide/Cas endonuclease system described herein. The Cas endonuclease may not successfully recognize a target DNA sequence if the target DNA sequence is not followed by a PAM sequence. The sequence and length of a PAM herein can differ depending on the Cas protein or Cas protein complex used. The PAM sequence can be of any length but is typically 1, 2, 3, 4, 5, 6, 7, 8, 9, 10, 11, 12, 13, 14, 15, 16, 17, 18, 19 or 20 nucleotides long.

[0092] The guide polynucleotide/Cas systems described herein can be used for gene targeting.

[0093] The terms “gene targeting”, “targeting”, and “DNA targeting” are used interchangeably herein. DNA targeting herein may be the specific introduction of a knock-out, edit, or knock-in at a particular DNA sequence, such as in a chromosome or plasmid of a cell. In general, DNA targeting can be performed herein by cleaving one or both strands at a specific DNA sequence in a cell with a Cas protein associated with a suitable polynucleotide component. Once a single or double-strand break is induced in the DNA, the cell's DNA repair mechanism is activated to repair the break via nonhomologous end-joining (NHEJ) or Homology-Directed Repair (HDR) processes which can lead to modifications at the target site.

[0094] The terms “knock-out”, “gene knock-out” and “genetic knock-out” are used interchangeably herein. A knock-out represents a DNA sequence of a cell that has been rendered partially or completely inoperative by targeting with a Cas protein; such a DNA sequence prior to knock-out could have encoded an amino acid sequence, or could have had a regulatory function (e.g., promoter), for example.

[0095] As described herein, a guided Cas endonuclease can recognize, bind to a DNA target sequence and introduce a single strand (nick) or double-strand break. Once a single or double-strand break is induced in the DNA, the cell's DNA repair mechanism is activated to repair the break. Error-prone DNA repair mechanisms can produce mutations at double-strand break sites. The most common repair mechanism to bring the broken ends together is the nonhomologous end-joining (NHEJ) pathway (Bleuyard et al., (2006) DNA Repair 5:1-12). The structural integrity of chromosomes is typically preserved by the repair, but deletions, insertions, or other rearrangements (such as chromosomal translocations) are possible (Siebert and Puchta, 2002, Plant Cell 14:1121-31; Pacher et al., 2007, Genetics 175:21-9).

[0096] A knock-out may be produced by an indel (insertion or deletion of nucleotide bases in a target DNA sequence through NHEJ), or by specific removal of sequence that reduces or completely destroys the function of sequence at or near the targeting site.

[0097] In one embodiment, the disclosure describes a method for modifying a target site in the genome of a cell, the method comprising introducing into said cell at least one chimeric engineered guide RNA, and a Cas endonuclease comprising a first nuclease domain of SEQ ID NO: 88, and a second nuclease domain comprising at least one nuclease subdomain selected from the group consisting of SEQ ID NO: 90, SEQ ID NO: 92 and SEQ ID NO: 94, wherein said chimeric engineered guide RNA and Cas endonuclease can form a complex that is capable of recognizing, binding to, and optionally nicking, cleaving, or covalently attaching to all or part of said target site.

[0098] The guide polynucleotide/Cas endonuclease system can be used in combination with at least one polynucleotide modification template to allow for editing (modification) of a genomic nucleotide sequence of interest. (See also U.S. Patent Application US20150082478, published on Mar. 19, 2015 and WO2015/026886, published on Feb. 26, 2015, both are incorporated by reference herein.)

[0099] A “modified nucleotide” or “edited nucleotide” refers to a nucleotide sequence of interest that comprises at least one alteration when compared to its non-modified nucleotide sequence. Such “alterations” include, for example: (i) replacement of at least one nucleotide, (ii) a deletion of at least one nucleotide, (iii) an insertion of at least one nucleotide, or (iv) any combination of (i)-(iii).

[0100] The term “polynucleotide modification template” includes a polynucleotide that comprises at least one nucleotide modification when compared to the nucleotide sequence to be edited. A nucleotide modification can be at least one nucleotide substitution, addition or deletion. Optionally, the polynucleotide modification template can further comprise homologous nucleotide sequences flanking the at least one nucleotide modification, wherein the flanking homologous nucleotide sequences provide sufficient homology to the desired nucleotide sequence to be edited.

[0101] In one embodiment, the disclosure comprises a method for editing a nucleotide sequence in the genome of a cell, the method comprising introducing into said cell at least one polynucleotide modification template, at least one chimeric engineered guide RNA, and a Cas endonuclease comprising a first nuclease domain of SEQ ID NO: 88, and a second nuclease domain comprising at least one nuclease subdomain selected from the group consisting of SEQ ID NO: 90, SEQ ID NO: 92 and SEQ ID NO: 94, wherein said polynucleotide modification template comprises at least one nucleotide modification of said nucleotide sequence, wherein said chimeric engineered guide RNA and Cas endonuclease can form a complex that is capable of recognizing, binding to, and optionally nicking, cleaving, or covalently attaching to all or part of said target site.

[0102] The nucleotide to be edited can be located within or outside a target site recognized and cleaved by a Cas endonuclease. In one embodiment, the at least one nucleotide modification is not a modification at a target site recognized and cleaved by a Cas endonuclease. In another embodiment, there are at least 1, 2, 3, 4, 5, 6, 7, 8, 9, 10, 11, 12, 13, 14, 15, 16, 17, 18, 19, 20, 21, 22, 23, 24, 25, 26, 27, 30, 40, 50, 100, 200, 300, 400, 500, 600, 700, 900 or 1000 nucleotides between the at least one nucleotide to be edited and the genomic target site.

[0103] The method for editing a nucleotide sequence in the genome of a cell can be a method without the use of an exogenous selectable marker by restoring function to a non-functional gene product as described in U.S. patent application 62/243,719, filed Oct. 20, 2015 and 62/309,033, filed Mar. 16, 2016.

[0104] The terms “knock-in”, “gene knock-in, “gene insertion” and “genetic knock-in” are used interchangeably herein. A knock-in represents the replacement or insertion of a DNA sequence at a specific DNA sequence in cell by targeting with a Cas protein (for example by homologous recombination (HR), wherein a suitable donor DNA polynucleotide is also used). Examples of knock-ins are a specific insertion of a heterologous amino acid coding sequence in a coding region of a gene, or a specific insertion of a transcriptional regulatory element in a genetic locus.

[0105] Various methods and compositions can be employed to obtain a cell or organism having a polynucleotide of interest inserted in a target site for a Cas endonuclease. Such methods can employ homologous recombination (HR) to provide integration of the polynucleotide of Interest at the target site. In one method described herein, a polynucleotide of interest is introduced into the organism cell via a donor DNA construct. As used herein, “donor DNA” is a DNA construct that comprises a polynucleotide of interest to be inserted into the target site of a Cas endonuclease. The donor DNA construct can further comprise a first and a second region of homology that flank the polynucleotide of interest. The first and second regions of homology of the donor DNA share homology to a first and a second genomic region, respectively, present in or flanking the target site of the cell or organism genome.

[0106] The donor DNA can be tethered to the guide polynucleotide. Tethered donor DNAs can allow for co-localizing target and donor DNA, useful in genome editing, gene insertion, and targeted genome regulation, and can also be useful in targeting post-mitotic cells where function of endogenous HR machinery is expected to be highly diminished (Mali et al., 2013, Nature Methods Vol. 10: 957-963).

[0107] Episomal DNA molecules can also be ligated into the double-strand break, for example, integration of T-DNAs into chromosomal double-strand breaks (Chilton and Que, (2003) Plant Physiol 133:956-65; Salomon and Puchta, (1998) EMBO J 17:6086-95). Once the sequence around the double-strand breaks is altered, for example, by exonuclease activities involved in the maturation of double-strand breaks, gene conversion pathways can restore the original structure if a homologous sequence is available, such as a homologous chromosome in non-dividing somatic cells, or a sister chromatid after DNA replication (Molinier et al., (2004) Plant Cell 16:342-52). Ectopic and/or epigenic DNA sequences may also serve as a DNA repair template for homologous recombination (Puchta, (1999) Genetics 152:1173-81).

[0108] Homology-directed repair (HDR) is a mechanism in cells to repair double-stranded and single stranded DNA breaks. Homology-directed repair includes homologous recombination (HR) and single-strand annealing (SSA) (Lieber. 2010 Annu. Rev. Biochem. 79:181-211). The most common form of HDR is called homologous recombination (HR), which has the longest sequence homology requirements between the donor and acceptor DNA. Other forms of HDR include single-stranded annealing (SSA) and breakage-induced replication, and these require shorter sequence homology relative to HR. Homology-directed repair at nicks (single-stranded breaks) can occur via a mechanism distinct from HDR at double-strand breaks (Davis and Maizels. PNAS (0027-8424), 111 (10), p. E924-E932).

[0109] By “homology” is meant DNA sequences that are similar. For example, a “region of homology to a genomic region” that is found on the donor DNA is a region of DNA that has a similar sequence to a given “genomic region” in the cell or organism genome. A region of homology can be of any length that is sufficient to promote homologous recombination at the cleaved target site. For example, the region of homology can comprise at least 5-10, 5-15, 5-20, 5-25, 5-30, 5-35, 5-40, 5-45, 5-50, 5-55, 5-60, 5-65, 5-70, 5-75, 5-80, 5-85, 5-90, 5-95, 5-100, 5-200, 5-300, 5-400, 5-500, 5-600, 5-700, 5-800, 5-900, 5-1000, 5-1100, 5-1200, 5-1300, 5-1400, 5-1500, 5-1600, 5-1700, 5-1800, 5-1900, 5-2000, 5-2100, 5-2200, 5-2300, 5-2400, 5-2500, 5-2600, 5-2700, 5-2800, 5-2900, 5-3000, 5-3100 or more bases in length such that the region of homology has sufficient homology to undergo homologous recombination with the corresponding genomic region. “Sufficient homology” indicates that two polynucleotide sequences have sufficient structural similarity to act as substrates for a homologous recombination reaction. The structural similarity includes overall length of each polynucleotide fragment, as well as the sequence similarity of the polynucleotides. Sequence similarity can be described by the percent sequence identity over the whole length of the sequences, and/or by conserved regions comprising localized similarities such as contiguous nucleotides having 100% sequence identity, and percent sequence identity over a portion of the length of the sequences.

[0110] The amount of homology or sequence identity shared by a target and a donor polynucleotide can vary and includes total lengths and/or regions having unit integral values in the ranges of about 1-20 bp, 20-50 bp, 50-100 bp, 75-150 bp, 100-250 bp, 150-300 bp, 200-400 bp, 250-500 bp, 300-600 bp, 350-750 bp, 400-800 bp, 450-900 bp, 500-1000 bp, 600-1250 bp, 700-1500 bp, 800-1750 bp, 900-2000 bp, 1-2.5 kb, 1.5-3 kb, 2-4 kb, 2.5-5 kb, 3-6 kb, 3.5-7 kb, 4-8 kb, 5-10 kb, or up to and including the total length of the target site. These ranges include every integer within the range, for example, the range of 1-20 bp includes 1, 2, 3, 4, 5, 6, 7, 8, 9, 10, 11, 12, 13, 14, 15, 16, 17, 18, 19 and 20 bps. The amount of homology can also described by percent sequence identity over the full aligned length of the two polynucleotides which includes percent sequence identity of about at least 50%, 55%, 60%, 65%, 70%, 71%, 72%, 73%, 74%, 75%, 76%, 77%, 78%, 79%, 80%, 81%, 82%, 83%, 84%, 85%, 86%, 87%, 88%, 89%, 90%, 91%, 92%, 93%, 94%, 95%, 96%, 97%, 98%, 99% or 100%. Sufficient homology includes any combination of polynucleotide length, global percent sequence identity, and optionally conserved regions of contiguous nucleotides or local percent sequence identity, for example sufficient homology can be described as a region of 75-150 bp having at least 80% sequence identity to a region of the target locus. Sufficient homology can also be described by the predicted ability of two polynucleotides to specifically hybridize under high stringency conditions, see, for example, Sambrook et al., (1989) Molecular Cloning: A Laboratory Manual, (Cold Spring Harbor Laboratory Press, NY); Current Protocols in Molecular Biology, Ausubel et al., Eds (1994) Current Protocols, (Greene Publishing Associates, Inc. and John Wiley & Sons, Inc.); and, Tijssen (1993) Laboratory Techniques in Biochemistry and Molecular Biology—Hybridization with Nucleic Acid Probes, (Elsevier, New York).

[0111] As used herein, a “genomic region” is a segment of a chromosome in the genome of a cell that is present on either side of the target site or, alternatively, also comprises a portion of the target site. The genomic region can comprise at least 5-10, 5-15, 5-20, 5-25, 5-30, 5-35, 5-40, 5-45, 5-50, 5-55, 5-60, 5-65, 5-70, 5-75, 5-80, 5-85, 5-90, 5-95, 5-100, 5-200, 5-300, 5-400, 5-500, 5-600, 5-700, 5-800, 5-900, 5-1000, 5-1100, 5-1200, 5-1300, 5-1400, 5-1500, 5-1600, 5-1700, 5-1800, 5-1900, 5-2000, 5-2100, 5-2200, 5-2300, 5-2400, 5-2500, 5-2600, 5-2700, 5-2800, 5-2900, 5-3000, 5-3100 or more bases such that the genomic region has sufficient homology to undergo homologous recombination with the corresponding region of homology.

[0112] The structural similarity between a given genomic region and the corresponding region of homology found on the donor DNA can be any degree of sequence identity that allows for homologous recombination to occur. For example, the amount of homology or sequence identity shared by the “region of homology” of the donor DNA and the “genomic region” of the organism genome can be at least 50%, 55%, 60%, 65%, 70%, 75%, 80%, 8⁻¹%, 82%, 83%, 84%, 85%, 86%, 87%, 88%, 89%, 90%, 91%, 92%, 93%, 94%, 95%, 96%, 97%, 98%, 99% or 100% sequence identity, such that the sequences undergo homologous recombination

[0113] The region of homology on the donor DNA can have homology to any sequence flanking the target site. While in some instances the regions of homology share significant sequence homology to the genomic sequence immediately flanking the target site, it is recognized that the regions of homology can be designed to have sufficient homology to regions that may be further 5′ or 3′ to the target site. The regions of homology can also have homology with a fragment of the target site along with downstream genomic regions

[0114] In one embodiment, the first region of homology further comprises a first fragment of the target site and the second region of homology comprises a second fragment of the target site, wherein the first and second fragments are dissimilar.

[0115] As used herein, “homologous recombination” includes the exchange of DNA fragments between two DNA molecules at the sites of homology. The frequency of homologous recombination is influenced by a number of factors. Different organisms vary with respect to the amount of homologous recombination and the relative proportion of homologous to non-homologous recombination. Generally, the length of the region of homology affects the frequency of homologous recombination events: the longer the region of homology, the greater the frequency. The length of the homology region needed to observe homologous recombination is also species-variable. In many cases, at least 5 kb of homology has been utilized, but homologous recombination has been observed with as little as 25-50 bp of homology. See, for example, Singer et al., (1982) Cell 31:25-33; Shen and Huang, (1986) Genetics 112:441-57; Watt et al., (1985) Proc. Natl. Acad. Sci. USA 82:4768-72, Sugawara and Haber, (1992) Mol Cell Biol 12:563-75, Rubnitz and Subramani, (1984) Mol Cell Biol 4:2253-8; Ayares et al., (1986) Proc. Natl. Acad. Sci. USA 83:5199-203; Liskay et al., (1987) Genetics 115:161-7.

[0116] Alteration of the genome of a prokaryotic and eukaryotic cell or organism cell, for example, through homologous recombination (HR), is a powerful tool for genetic engineering. Homologous recombination has been demonstrated in plants (Halfter et al., (1992) Mol Gen Genet 231:186-93) and insects (Dray and Gloor, 1997, Genetics 147:689-99). Homologous recombination has also been accomplished in other organisms. For example, at least 150-200 bp of homology was required for homologous recombination in the parasitic protozoan Leishmania (Papadopoulou and Dumas, (1997) Nucleic Acids Res 25:4278-86). In the filamentous fungus Aspergillus nidulans, gene replacement has been accomplished with as little as 50 bp flanking homology (Chaveroche et al., (2000) Nucleic Acids Res 28:e97). Targeted gene replacement has also been demonstrated in the ciliate Tetrahymena thermophila (Gaertig et al., (1994) Nucleic Acids Res 22:5391-8). In mammals, homologous recombination has been most successful in the mouse using pluripotent embryonic stem cell lines (ES) that can be grown in culture, transformed, selected and introduced into a mouse embryo (Watson et al., 1992, Recombinant DNA, 2nd Ed., (Scientific American Books distributed by WH Freeman & Co.).

[0117] DNA double-strand breaks appear to be an effective factor to stimulate homologous recombination pathways (Puchta et al., (1995) Plant Mol Biol 28:281-92; Tzfira and White, (2005) Trends Biotechnol 23:567-9; Puchta, (2005) J Exp Bot 56:1-14). Using DNA-breaking agents, a two- to nine-fold increase of homologous recombination was observed between artificially constructed homologous DNA repeats in plants (Puchta et al., (1995) Plant Mol Biol 28:281-92). In maize protoplasts, experiments with linear DNA molecules demonstrated enhanced homologous recombination between plasmids (Lyznik et al., (1991) Mol Gen Genet 230:209-18).

[0118] In one embodiment, the disclosure comprises a method for modifying a target site in the genome of a cell, the method comprising providing to said cell at least one chimeric engineered guide RNA, at least one donor DNA, and a Cas endonuclease comprising a first nuclease domain of SEQ ID NO: 88, and a second nuclease domain comprising at least one nuclease subdomain selected from the group consisting of SEQ ID NO: 90, SEQ ID NO: 92 and SEQ ID NO: 94, wherein said at least one chimeric engineered guide RNA and Cas endonuclease can form a complex that is capable of recognizing, binding to, and optionally nicking, cleaving, or covalently attaching to all or part of said target site, wherein said donor DNA comprises a polynucleotide of interest. The method can further comprise identifying at least one cell that said polynucleotide of interest integrated in or near said target site.

[0119] Further uses for guide RNA/Cas endonuclease systems have been described (See U.S. Patent Application US 2015-0082478 A1, published on Mar. 19, 2015, WO2015/026886 A1, published on Feb. 26, 2015, US 2015-0059010 A1, published on Feb. 26, 2015, U.S. application 62/023,246, filed on Jul. 7, 2014, and U.S. application 62/036,652, filed on Aug. 13, 2014, all of which are incorporated by reference herein) and include but are not limited to modifying or replacing nucleotide sequences of interest (such as a regulatory elements), insertion of polynucleotides of interest, gene knock-out, gene-knock in, modification of splicing sites and/or introducing alternate splicing sites, modifications of nucleotide sequences encoding a protein of interest, amino acid and/or protein fusions, and gene silencing by expressing an inverted repeat into a gene of interest.

[0120] A targeting method herein can be performed in such a way that two or more DNA target sites are targeted in the method, for example. Such a method can optionally be characterized as a multiplex method. Two, three, four, five, six, seven, eight, nine, ten, or more target sites can be targeted at the same time in certain embodiments. A multiplex method is typically performed by a targeting method herein in which multiple different RNA components are provided, each designed to guide a guide polynucleotide/Cas endonuclease complex to a unique DNA target site.

[0121] Polynucleotides of interest and/or traits can be stacked together in a complex trait locus as described in WO2012/129373, published Mar. 14, 2013, and in PCT/US13/22891, published Jan. 24, 2013, both hereby incorporated by reference. The guide polynucleotide/Lapis Cas endonuclease system described herein provides for an efficient system to generate double-strand breaks and allows for traits to be stacked in a complex trait locus.

[0122] A guide polynucleotide/Cas system as described herein, mediating gene targeting, can be used in methods for directing transgene insertion and/or for producing complex transgenic trait loci comprising multiple transgenes in a fashion similar as disclosed in WO2012/129373, published Mar. 14, 2013 where instead of using a double-strand break inducing agent to introduce a gene of interest, a guide polynucleotide/Cas system as disclosed herein is used. A complex trait locus includes a genomic locus that has multiple transgenes genetically linked to each other. By inserting independent transgenes within 0.1, 0.2, 0.3, 0.4, 0.5, 1.0, 2, or even 5 centimorgans (cM) from each other, the transgenes can be bred as a single genetic locus (see, for example, U.S. patent application Ser. No. 13/427,138) or PCT application PCT/US2012/030061. After selecting a plant comprising a transgene, plants containing (at least) one transgenes can be crossed to form an F1 that contains both transgenes. In progeny from these F1 (F2 or BC1) 1/500 progeny would have the two different transgenes recombined onto the same chromosome. The complex locus can then be bred as single genetic locus with both transgene traits. This process can be repeated to stack as many traits as desired.

[0123] The Cas endonuclease described herein (including the Lapis Cas) can be expressed and purified by methods known in the art (such as those described in Example 2 of U.S. patent applications 62/162,377 filed May 15, 2015, incorporated herein by reference).

[0124] Many endonucleases have been described to date that can recognize specific PAM sequences (see for example—U.S. patent applications 62/162,377 filed May 15, 2015 and 62/162,353 filed May 15, 2015 and Zetsche B et al. 2015. Cell 163, 1013) and cleave the target DNA at a specific positions. It is understood that based on the methods and embodiments described herein utilizing a novel guided Cas system one skilled in the art can now tailor these methods such that they can utilize any guided endonuclease system.

[0125] Endonucleases are enzymes that cleave the phosphodiester bond within a polynucleotide chain, and include restriction endonucleases that cleave DNA at specific sites without damaging the bases. Restriction endonucleases include Type I, Type II, Type III, and Type IV endonucleases, which further include subtypes. In the Type I and Type III systems, both the methylase and restriction activities are contained in a single complex. Endonucleases also include meganucleases, also known as homing endonucleases (HEases), which like restriction endonucleases, bind and cut at a specific recognition site, however the recognition sites for meganucleases are typically longer, about 18 bp or more (patent application PCT/US12/30061, filed on Mar. 22, 2012). Meganucleases have been classified into four families based on conserved sequence motifs, the families are the LAGLIDADG, GIY-YIG, H—N—H, and His-Cys box families. These motifs participate in the coordination of metal ions and hydrolysis of phosphodiester bonds. HEases are notable for their long recognition sites, and for tolerating some sequence polymorphisms in their DNA substrates. The naming convention for meganuclease is similar to the convention for other restriction endonuclease. Meganucleases are also characterized by prefix F-, I-, or PI- for enzymes encoded by free-standing ORFs, introns, and inteins, respectively. One step in the recombination process involves polynucleotide cleavage at or near the recognition site. This cleaving activity can be used to produce a double-strand break. For reviews of site-specific recombinases and their recognition sites, see, Sauer (1994) Curr Op Biotechnol 5:521-7; and Sadowski (1993) FASEB 7:760-7. In some examples the recombinase is from the Integrase or Resolvase families.

[0126] TAL effector nucleases are a class of sequence-specific nucleases that can be used to make double-strand breaks at specific target sequences in the genome of a plant or other organism. (Miller et al. (2011) Nature Biotechnology 29:143-148). Zinc finger nucleases (ZFNs) are engineered double-strand break inducing agents comprised of a zinc finger DNA binding domain and a double-strand-break-inducing agent domain. Recognition site specificity is conferred by the zinc finger domain, which typically comprising two, three, or four zinc fingers, for example having a C2H2 structure, however other zinc finger structures are known and have been engineered. Zinc finger domains are amenable for designing polypeptides which specifically bind a selected polynucleotide recognition sequence. ZFNs include an engineered DNA-binding zinc finger domain linked to a non-specific endonuclease domain, for example nuclease domain from a Type IIs endonuclease such as FokI. Additional functionalities can be fused to the zinc-finger binding domain, including transcriptional activator domains, transcription repressor domains, and methylases. In some examples, dimerization of nuclease domain is required for cleavage activity. Each zinc finger recognizes three consecutive base pairs in the target DNA. For example, a 3 finger domain recognized a sequence of 9 contiguous nucleotides, with a dimerization requirement of the nuclease, two sets of zinc finger triplets are used to bind an 18 nucleotide recognition sequence.

[0127] Any one component of the guide polynucleotide/Cas endonuclease complex, the guide polynucleotide/Cas endonuclease complex itself, as well as the polynucleotide modification template(s) and/or donor DNA(s), can be introduced into a cell by any method known in the art.

[0128] “Introducing” is intended to mean presenting to the organism, such as a cell or organism, the polynucleotide or polypeptide or polynucleotide-protein complex, in such a manner that the component(s) gains access to the interior of a cell of the organism or to the cell itself. The methods and compositions do not depend on a particular method for introducing a sequence into an organism or cell, only that the polynucleotide or polypeptide gains access to the interior of at least one cell of the organism. Introducing includes reference to the incorporation of a nucleic acid into a eukaryotic or prokaryotic cell where the nucleic acid may be incorporated into the genome of the cell, and includes reference to the transient (direct) provision of a nucleic acid, protein or polynucleotide-protein complex (PGEN, RGEN) to the cell.

[0129] Methods for introducing polynucleotides or polypeptides or a polynucleotide-protein complex into cells or organisms are known in the art including, but not limited to, microinjection, electroporation, stable transformation methods, transient transformation methods, ballistic particle acceleration (particle bombardment), whiskers mediated transformation, Agrobacterium-mediated transformation, direct gene transfer, viral-mediated introduction, transfection, transduction, cell-penetrating peptides, mesoporous silica nanoparticle (MSN)-mediated direct protein delivery, topical applications, sexual crossing, sexual breeding, and any combination thereof.

[0130] For example, the guide polynucleotide can be introduced into a cell directly (transiently) as a single stranded or double stranded polynucleotide molecule. The guide RNA can also be introduced into a cell indirectly by introducing a recombinant DNA molecule comprising a heterologous nucleic acid fragment encoding the guide RNA, operably linked to a specific promoter that is capable of transcribing the guide RNA in said cell. The specific promoter can be, but is not limited to, a RNA polymerase Ill promoter, which allow for transcription of RNA with precisely defined, unmodified, 5′- and 3′-ends (Ma et al., 2014, Mol. Ther. Nucleic Acids 3:e161; DiCarlo et al., 2013, Nucleic Acids Res. 41: 4336-4343; WO2015026887, published on Feb. 26, 2015). Any promoter capable of transcribing the guide RNA in a cell can be used and includes a heat shock/heat inducible promoter operably linked to a nucleotide sequence encoding the guide RNA.

[0131] The Cas endonuclease can be introduced into a cell by directly introducing the Cas protein itself (referred to as direct delivery of Cas endonuclease), the mRNA encoding the Cas protein, and/or the guide polynucleotide/Cas endonuclease complex itself, using any method known in the art. The Cas endonuclease can also be introduced into a cell indirectly by introducing a recombinant DNA molecule that encodes the Cas endonuclease. The endonuclease can be introduced into a cell transiently or can be incorporated into the genome of the host cell using any method known in the art. Uptake of the endonuclease and/or the guided polynucleotide into the cell can be facilitated with a Cell Penetrating Peptide (CPP) as described in U.S. application 62/075,999, filed Nov. 6, 2014. Any promoter capable of expressing the Lapis Cas endonuclease in a cell can be used and includes a heat shock/heat inducible promoter operably linked to a nucleotide sequence encoding the Lapis Cas endonuclease.

[0132] Direct delivery of a polynucleotide modification template into plant cells can be achieved through particle mediated delivery, and any other direct method of delivery, such as but not limiting to, polyethylene glycol (PEG)-mediated transfection to protoplasts, whiskers mediated transformation, electroporation, particle bombardment, cell-penetrating peptides, or mesoporous silica nanoparticle (MSN)-mediated direct protein delivery can be successfully used for delivering a polynucleotide modification template in eukaryotic cells, such as plant cells.

[0133] The donor DNA can be introduced by any means known in the art. The donor DNA may be provided by any transformation method known in the art including, for example, Agrobacterium-mediated transformation or biolistic particle bombardment. The donor DNA may be present transiently in the cell or it could be introduced via a viral replicon. In the presence of the Cas endonuclease and the target site, the donor DNA is inserted into the transformed plant's genome.

[0134] Direct delivery of any one of the guided Cas system components can be accompanied by direct delivery (co-delivery) of other mRNAs that can promote the enrichment and/or visualization of cells receiving the guide polynucleotide/Cas endonuclease complex components. For example, direct co-delivery of the guide polynucleotide/Cas endonuclease components (and/or guide polynucleotide/Cas endonuclease complex itself) together with mRNA encoding phenotypic markers (such as but not limiting to transcriptional activators such as CRC (Bruce et al. 2000 The Plant Cell 12:65-79) can enable the selection and enrichment of cells without the use of an exogenous selectable marker by restoring function to a non-functional gene product as described in U.S. patent application 62/243,719, filed Oct. 20, 2015 and 62/309,033, filed Mar. 16, 2016.

[0135] Protocols for introducing polynucleotides, polypeptides or polynucleotide-protein complexes (PGEN, RGEN) into eukaryotic cells, such as plants or plant cells are known and include microinjection (Crossway et al., (1986) Biotechniques 4:320-34 and U.S. Pat. No. 6,300,543), meristem transformation (U.S. Pat. No. 5,736,369), electroporation (Riggs et al., (1986) Proc. Natl. Acad. Sci. USA 83:5602-6, Agrobacterium-mediated transformation (U.S. Pat. Nos. 5,563,055 and 5,981,840), whiskers mediated transformation (Ainley et al. 2013, Plant Biotechnology Journal 11:1126-1134; Shaheen A. and M. Arshad 2011 Properties and Applications of Silicon Carbide (2011), 345-358 Editor(s): Gerhardt, Rosario. Publisher: InTech, Rijeka, Croatia. CODEN: 69PQBP; ISBN: 978-953-307-201-2), direct gene transfer (Paszkowski et al., (1984) EMBO J 3:2717-22), and ballistic particle acceleration (U.S. Pat. Nos. 4,945,050; 5,879,918; 5,886,244; 5,932,782; Tomes et al., (1995) “Direct DNA Transfer into Intact Plant Cells via Microprojectile Bombardment” in Plant Cell, Tissue, and Organ Culture: Fundamental Methods, ed. Gamborg & Phillips (Springer-Verlag, Berlin); McCabe et al., (1988) Biotechnology 6:923-6; Weissinger et al., (1988) Ann Rev Genet 22:421-77; Sanford et al., (1987) Particulate Science and Technology 5:27-37 (onion); Christou et al., (1988) Plant Physiol 87:671-4 (soybean); Finer and McMullen, (1991) In Vitro Cell Dev Biol 27P:175-82 (soybean); Singh et al., (1998) Theor Appl Genet 96:319-24 (soybean); Datta et al., (1990) Biotechnology 8:736-40 (rice); Klein et al., (1988) Proc. Natl. Acad. Sci. USA 85:4305-9 (maize); Klein et al., (1988) Biotechnology 6:559-63 (maize); U.S. Pat. Nos. 5,240,855; 5,322,783 and 5,324,646; Klein et al., (1988) Plant Physiol 91:440-4 (maize); Fromm et al., (1990) Biotechnology 8:833-9 (maize); Hooykaas-Van Slogteren et al., (1984) Nature 311:763-4; U.S. Pat. No. 5,736,369 (cereals); Bytebier et al., (1987) Proc. Natl. Acad. Sci. USA 84:5345-9 (Liliaceae); De Wet et al., (1985) in The Experimental Manipulation of Ovule Tissues, ed. Chapman et al., (Longman, N.Y.), pp. 197-209 (pollen); Kaeppler et al., (1990) Plant Cell Rep 9:415-8) and Kaeppler et al., (1992) Theor Appl Genet 84:560-6 (whisker-mediated transformation); D'Halluin et al., (1992) Plant Cell 4:1495-505 (electroporation); Li et al., (1993) Plant Cell Rep 12:250-5; Christou and Ford (1995) Annals Botany 75:407-13 (rice) and Osjoda et al., (1996) Nat Biotechnol 14:745-50 (maize via Agrobacterium tumefaciens).

[0136] Alternatively, polynucleotides may be introduced into plant or plant cells by contacting cells or organisms with a virus or viral nucleic acids. Generally, such methods involve incorporating a polynucleotide within a viral DNA or RNA molecule. In some examples a polypeptide of interest may be initially synthesized as part of a viral polyprotein, which is later processed by proteolysis in vivo or in vitro to produce the desired recombinant protein. Methods for introducing polynucleotides into plants and expressing a protein encoded therein, involving viral DNA or RNA molecules, are known, see, for example, U.S. Pat. Nos. 5,889,191, 5,889,190, 5,866,785, 5,589,367 and 5,316,931.

[0137] The polynucleotide or recombinant DNA construct can be provided to or introduced into a prokaryotic and eukaryotic cell or organism using a variety of transient transformation methods. Such transient transformation methods include, but are not limited to, the introduction of the polynucleotide construct directly into the plant.

[0138] Nucleid acids and proteins can be provided to a cell by any method including methods using molecules to facilitate the uptake of anyone or all components of a guided Cas system (protein and/or nucleic acids), such as cell-penetrating peptides and nanocariers. See also US20110035836 Nanocarier based plant transfection and transduction, and EP 2821486 A1 Method of introducing nucleic acid into plant cells, incorporated herein by reference.

[0139] Other methods of introducing polynucleotides into a prokaryotic and eukaryotic cell or organism or plant part can be used, including plastid transformation methods, and the methods for introducing polynucleotides into tissues from seedlings or mature seeds.

[0140] Stable transformation is intended to mean that the nucleotide construct introduced into an organism integrates into a genome of the organism and is capable of being inherited by the progeny thereof. Transient transformation is intended to mean that a polynucleotide is introduced into the organism and does not integrate into a genome of the organism or a polypeptide is introduced into an organism. Transient transformation indicates that the introduced composition is only temporarily expressed or present in the organism.

[0141] Polynucleotides of interest are further described herein and include polynucleotides reflective of the commercial markets and interests of those involved in the development of the crop. Crops and markets of interest change, and as developing nations open up world markets, new crops and technologies will emerge also. In addition, as our understanding of agronomic traits and characteristics such as yield and heterosis increase, the choice of genes for genetic engineering will change accordingly.

[0142] Polynucleotides of interest include, but are not limited to, polynucleotides encoding important traits for agronomics, herbicide-resistance, insecticidal resistance, disease resistance, nematode resistance, herbicide resistance, microbial resistance, fungal resistance, viral resistance, fertility or sterility, grain characteristics, and commercial products.

[0143] General categories of polynucleotides of interest include, for example, genes of interest involved in information, such as zinc fingers, those involved in communication, such as kinases, and those involved in housekeeping, such as heat shock proteins. More specific polynucleotides of interest include, but are not limited to, genes involved in crop yield, grain quality, crop nutrient content, starch and carbohydrate quality and quantity as well as those affecting kernel size, sucrose loading, protein quality and quantity, nitrogen fixation and/or utilization, fatty acid and oil composition, genes encoding proteins conferring resistance to abiotic stress (such as drought, nitrogen, temperature, salinity, toxic metals or trace elements, or those conferring resistance to toxins such as pesticides and herbicides), genes encoding proteins conferring resistance to biotic stress (such as attacks by fungi, viruses, bacteria, insects, and nematodes, and development of diseases associated with these organisms).

[0144] Agronomically important traits such as oil, starch, and protein content can be genetically altered in addition to using traditional breeding methods. Modifications include increasing content of oleic acid, saturated and unsaturated oils, increasing levels of lysine and sulfur, providing essential amino acids, and also modification of starch. Hordothionin protein modifications are described in U.S. Pat. Nos. 5,703,049, 5,885,801, 5,885,802, and 5,990,389, herein incorporated by reference.

[0145] Polynucleotides of interest include any nucleotide sequence encoding a protein or polypeptide that improves desirability of crops. Polynucleotide sequences of interest may encode proteins involved in providing disease or pest resistance. By “disease resistance” or “pest resistance” is intended that the plants avoid the harmful symptoms that are the outcome of the plant-pathogen interactions. Pest resistance genes may encode resistance to pests that have great yield drag such as rootworm, cutworm, European Corn Borer, and the like. Disease resistance and insect resistance genes such as lysozymes or cecropins for antibacterial protection, or proteins such as defensins, glucanases or chitinases for antifungal protection, or Bacillus thuringiensis endotoxins, protease inhibitors, collagenases, lectins, or glycosidases for controlling nematodes or insects are all examples of useful gene products. Genes encoding disease resistance traits include detoxification genes, such as against fumonisin (U.S. Pat. No. 5,792,931); avirulence (avr) and disease resistance (R) genes (Jones et al. (1994) Science 266:789; Martin et al. (1993) Science 262:1432; and Mindrinos et al. (1994) Cell 78:1089); and the like. Insect resistance genes may encode resistance to pests that have great yield drag such as rootworm, cutworm, European Corn Borer, and the like. Such genes include, for example, Bacillus thuringiensis toxic protein genes (U.S. Pat. Nos. 5,366,892; 5,747,450; 5,736,514; 5,723,756; 5,593,881; and Geiser et al. (1986) Gene 48:109); and the like.

[0146] An “herbicide resistance protein” or a protein resulting from expression of an “herbicide resistance-encoding nucleic acid molecule” includes proteins that confer upon a cell the ability to tolerate a higher concentration of an herbicide than cells that do not express the protein, or to tolerate a certain concentration of an herbicide for a longer period of time than cells that do not express the protein. Herbicide resistance traits may be introduced into plants by genes coding for resistance to herbicides that act to inhibit the action of acetolactate synthase (ALS, also referred to as acetohydroxyacid synthase, AHAS), in particular the sulfonylurea-type (UK: sulphonylurea) herbicides, genes coding for resistance to herbicides that act to inhibit the action of glutamine synthase, such as phosphinothricin or basta (e.g., the bar gene), glyphosate (e.g., the EPSP synthase gene and the GAT gene), HPPD inhibitors (e.g, the HPPD gene) or other such genes known in the art. See, for example, U.S. Pat. Nos. 7,626,077, 5,310,667, 5,866,775, 6,225,114, 6,248,876, 7,169,970, 6,867,293, and U.S. Provisional Application No. 61/401,456, each of which is herein incorporated by reference. The bar gene encodes resistance to the herbicide basta, the nptll gene encodes resistance to the antibiotics kanamycin and geneticin, and the ALS-gene mutants encode resistance to the herbicide chlorsulfuron.

[0147] Furthermore, it is recognized that the polynucleotide of interest may also comprise antisense sequences complementary to at least a portion of the messenger RNA (mRNA) for a targeted gene sequence of interest. Antisense nucleotides are constructed to hybridize with the corresponding mRNA. Modifications of the antisense sequences may be made as long as the sequences hybridize to and interfere with expression of the corresponding mRNA. In this manner, antisense constructions having 70%, 80%, or 85% sequence identity to the corresponding antisense sequences may be used. Furthermore, portions of the antisense nucleotides may be used to disrupt the expression of the target gene. Generally, sequences of at least 50 nucleotides, 100 nucleotides, 200 nucleotides, or greater may be used.

[0148] In addition, the polynucleotide of interest may also be used in the sense orientation to suppress the expression of endogenous genes in plants. Methods for suppressing gene expression in plants using polynucleotides in the sense orientation are known in the art. The methods generally involve transforming plants with a DNA construct comprising a promoter that drives expression in a plant operably linked to at least a portion of a nucleotide sequence that corresponds to the transcript of the endogenous gene. Typically, such a nucleotide sequence has substantial sequence identity to the sequence of the transcript of the endogenous gene, generally greater than about 65% sequence identity, about 85% sequence identity, or greater than about 95% sequence identity. See, U.S. Pat. Nos. 5,283,184 and 5,034,323; herein incorporated by reference.

[0149] The polynucleotide of interest can also be a phenotypic marker. A phenotypic marker is screenable or a selectable marker that includes visual markers and selectable markers whether it is a positive or negative selectable marker. Any phenotypic marker can be used. Specifically, a selectable or screenable marker comprises a DNA segment that allows one to identify, or select for or against a molecule or a cell that contains it, often under particular conditions. These markers can encode an activity, such as, but not limited to, production of RNA, peptide, or protein, or can provide a binding site for RNA, peptides, proteins, inorganic and organic compounds or compositions and the like.

[0150] Examples of selectable markers include, but are not limited to, DNA segments that comprise restriction enzyme sites; DNA segments that encode products which provide resistance against otherwise toxic compounds including antibiotics, such as, spectinomycin, ampicillin, kanamycin, tetracycline, Basta, neomycin phosphotransferase II (NEO) and hygromycin phosphotransferase (HPT)); DNA segments that encode products which are otherwise lacking in the recipient cell (e.g., tRNA genes, auxotrophic markers); DNA segments that encode products which can be readily identified (e.g., phenotypic markers such as β-galactosidase, GUS; fluorescent proteins such as green fluorescent protein (GFP), cyan (CFP), yellow (YFP), red (RFP), and cell surface proteins); the generation of new primer sites for PCR (e.g., the juxtaposition of two DNA sequence not previously juxtaposed), the inclusion of DNA sequences not acted upon or acted upon by a restriction endonuclease or other DNA modifying enzyme, chemical, etc.; and, the inclusion of a DNA sequences required for a specific modification (e.g., methylation) that allows its identification.

[0151] Additional selectable markers include genes that confer resistance to herbicidal compounds, such as sulphonylureas, glufosinate ammonium, bromoxynil, imidazolinones, and 2,4-dichlorophenoxyacetate (2,4-D). See for example, Acetolactase synthase (ALS) for resistance to sulfonylureas, imidazolinones, triazolopyrimidine sulfonamides, pyrimidinylsalicylates and sulphonylaminocarbonyl-triazolinones Shaner and Singh, 1997, Herbicide Activity: Toxicol Biochem Mol Biol 69-110); glyphosate resistant 5-enolpyruvylshikimate-3-phosphate (EPSPS)(Saroha et al. 1998, J. Plant Biochemistry & Biotechnology Vol 7:65-72);

[0152] Polynucleotides of interest includes genes that can be stacked or used in combination with other traits, such as but not limited to herbicide resistance or any other trait described herein. Polynucleotides of interest and/or traits can be stacked together in a complex trait locus as described in US-2013-0263324-A1, published 3 Oct. 2013 and in PCT/US13/22891, published Jan. 24, 2013, both applications are hereby incorporated by reference.

[0153] A polypeptide of interest includes any protein or polypeptide that is encoded by a polynucleotide of interest described herein.

[0154] Further provided are methods for identifying at least one plant cell, comprising in its genome, a polynucleotide of interest integrated at the target site. A variety of methods are available for identifying those plant cells with insertion into the genome at or near to the target site. Such methods can be viewed as directly analyzing a target sequence to detect any change in the target sequence, including but not limited to PCR methods, sequencing methods, nuclease digestion, Southern blots, and any combination thereof. See, for example, U.S. patent application Ser. No. 12/147,834, herein incorporated by reference to the extent necessary for the methods described herein. The method also comprises recovering a plant from the plant cell comprising a polynucleotide of Interest integrated into its genome. The plant may be sterile or fertile. It is recognized that any polynucleotide of interest can be provided, integrated into the plant genome at the target site, and expressed in a plant.

[0155] As used herein, “nucleic acid” means a polynucleotide and includes a single or a double-stranded polymer of deoxyribonucleotide or ribonucleotide bases. Nucleic acids may also include fragments and modified nucleotides. Thus, the terms “polynucleotide”, “nucleic acid sequence”, “nucleotide sequence” and “nucleic acid fragment” are used interchangeably to denote a polymer of RNA and/or DNA and/or RNA-DNA that is single- or double-stranded, optionally containing synthetic, non-natural, or altered nucleotide bases. Nucleotides (usually found in their 5′-monophosphate form) are referred to by their single letter designation as follows: “A” for adenosine or deoxyadenosine (for RNA or DNA, respectively), “C” for cytosine or deoxycytosine, “G” for guanosine or deoxyguanosine, “U” for uridine, “T” for deoxythymidine, “R” for purines (A or G), “Y” for pyrimidines (C or T), “K” for G or T, “H” for A or C or T, “I” for inosine, and “N” for any nucleotide.

[0156] “Open reading frame” is abbreviated ORF.

[0157] The terms “fragment that is functionally equivalent” and “functionally equivalent fragment” are used interchangeably herein. These terms refer to a portion or subsequence of an isolated nucleic acid fragment or polypeptide in which the ability to alter gene expression or produce a certain phenotype is retained whether or not the fragment encodes an active enzyme. For example, the fragment can be used in the design of genes to produce the desired phenotype in a modified plant. Genes can be designed for use in suppression by linking a nucleic acid fragment, whether or not it encodes an active enzyme, in the sense or antisense orientation relative to a plant promoter sequence.

[0158] The term “conserved domain” or “motif” means a set of amino acids conserved at specific positions along an aligned sequence of evolutionarily related proteins. While amino acids at other positions can vary between homologous proteins, amino acids that are highly conserved at specific positions indicate amino acids that are essential to the structure, the stability, or the activity of a protein. Because they are identified by their high degree of conservation in aligned sequences of a family of protein homologues, they can be used as identifiers, or “signatures”, to determine if a protein with a newly determined sequence belongs to a previously identified protein family.

[0159] Polynucleotide and polypeptide sequences, variants thereof, and the structural relationships of these sequences can be described by the terms “homology”, “homologous”, “substantially identical”, “substantially similar” and “corresponding substantially” which are used interchangeably herein. These refer to polypeptide or nucleic acid sequences wherein changes in one or more amino acids or nucleotide bases do not affect the function of the molecule, such as the ability to mediate gene expression or to produce a certain phenotype. These terms also refer to modification(s) of nucleic acid sequences that do not substantially alter the functional properties of the resulting nucleic acid relative to the initial, unmodified nucleic acid. These modifications include deletion, substitution, and/or insertion of one or more nucleotides in the nucleic acid fragment.

[0160] Substantially similar nucleic acid sequences encompassed may be defined by their ability to hybridize (under moderately stringent conditions, e.g., 0.5×SSC, 0.1% SDS, 60° C.) with the sequences exemplified herein, or to any portion of the nucleotide sequences disclosed herein and which are functionally equivalent to any of the nucleic acid sequences disclosed herein. Stringency conditions can be adjusted to screen for moderately similar fragments, such as homologous sequences from distantly related organisms, to highly similar fragments, such as genes that duplicate functional enzymes from closely related organisms. Post-hybridization washes determine stringency conditions.

[0161] The term “selectively hybridizes” includes reference to hybridization, under stringent hybridization conditions, of a nucleic acid sequence to a specified nucleic acid target sequence to a detectably greater degree (e.g., at least 2-fold over background) than its hybridization to non-target nucleic acid sequences and to the substantial exclusion of non-target nucleic acids. Selectively hybridizing sequences typically have about at least 80% sequence identity, or 90% sequence identity, up to and including 100% sequence identity (i.e., fully complementary) with each other.

[0162] The term “stringent conditions” or “stringent hybridization conditions” includes reference to conditions under which a probe will selectively hybridize to its target sequence in an in vitro hybridization assay. Stringent conditions are sequence-dependent and will be different in different circumstances. By controlling the stringency of the hybridization and/or washing conditions, target sequences can be identified which are 100% complementary to the probe (homologous probing). Alternatively, stringency conditions can be adjusted to allow some mismatching in sequences so that lower degrees of similarity are detected (heterologous probing). Generally, a probe is less than about 1000 nucleotides in length, optionally less than 500 nucleotides in length.

[0163] Typically, stringent conditions will be those in which the salt concentration is less than about 1.5 M Na ion, typically about 0.01 to 1.0 M Na ion concentration (or other salt(s)) at pH 7.0 to 8.3, and at least about 30° C. for short probes (e.g., 10 to 50 nucleotides) and at least about 60° C. for long probes (e.g., greater than 50 nucleotides). Stringent conditions may also be achieved with the addition of destabilizing agents such as formamide. Exemplary low stringency conditions include hybridization with a buffer solution of 30 to 35% formamide, 1 M NaCl, 1% SDS (sodium dodecyl sulphate) at 37° C., and a wash in 1× to 2×SSC (20×SSC=3.0 M NaCl/0.3 M trisodium citrate) at 50 to 55° C. Exemplary moderate stringency conditions include hybridization in 40 to 45% formamide, 1 M NaCl, 1% SDS at 37° C., and a wash in 0.5× to 1×SSC at 55 to 60° C. Exemplary high stringency conditions include hybridization in 50% formamide, 1 M NaCl, 1% SDS at 37° C., and a wash in 0.1×SSC at 60 to 65° C.

[0164] “Sequence identity” or “identity” in the context of nucleic acid or polypeptide sequences refers to the nucleic acid bases or amino acid residues in two sequences that are the same when aligned for maximum correspondence over a specified comparison window.

[0165] The term “percentage of sequence identity” refers to the value determined by comparing two optimally aligned sequences over a comparison window, wherein the portion of the polynucleotide or polypeptide sequence in the comparison window may comprise additions or deletions (i.e., gaps) as compared to the reference sequence (which does not comprise additions or deletions) for optimal alignment of the two sequences. The percentage is calculated by determining the number of positions at which the identical nucleic acid base or amino acid residue occurs in both sequences to yield the number of matched positions, dividing the number of matched positions by the total number of positions in the window of comparison and multiplying the results by 100 to yield the percentage of sequence identity. Useful examples of percent sequence identities include, but are not limited to, 50%, 55%, 60%, 65%, 70%, 75%, 80%, 85%, 90% or 95%, or any integer percentage from 50% to 100%. These identities can be determined using any of the programs described herein.

[0166] Sequence alignments and percent identity or similarity calculations may be determined using a variety of comparison methods designed to detect homologous sequences including, but not limited to, the MegAlign™ program of the LASERGENE bioinformatics computing suite (DNASTAR Inc., Madison, Wis.). Within the context of this application it will be understood that where sequence analysis software is used for analysis, that the results of the analysis will be based on the “default values” of the program referenced, unless otherwise specified. As used herein “default values” will mean any set of values or parameters that originally load with the software when first initialized.

[0167] The “Clustal V method of alignment” corresponds to the alignment method labeled Clustal V (described by Higgins and Sharp, (1989) CABIOS 5:151-153; Higgins et al., (1992) Comput Appl Biosci 8:189-191) and found in the MegAlign™ program of the LASERGENE bioinformatics computing suite (DNASTAR Inc., Madison, Wis.). For multiple alignments, the default values correspond to GAP PENALTY=10 and GAP LENGTH PENALTY=10. Default parameters for pairwise alignments and calculation of percent identity of protein sequences using the Clustal method are KTUPLE=1, GAP PENALTY=3, WINDOW=5 and DIAGONALS SAVED=5. For nucleic acids these parameters are KTUPLE=2, GAP PENALTY=5, WINDOW=4 and DIAGONALS SAVED=4. After alignment of the sequences using the Clustal V program, it is possible to obtain a “percent identity” by viewing the “sequence distances” table in the same program.

[0168] The “Clustal W method of alignment” corresponds to the alignment method labeled Clustal W (described by Higgins and Sharp, (1989) CABIOS 5:151-153; Higgins et al., (1992) Comput Appl Biosci 8:189-191) and found in the MegAlign™ v6.1 program of the LASERGENE bioinformatics computing suite (DNASTAR Inc., Madison, Wis.). Default parameters for multiple alignment (GAP PENALTY=10, GAP LENGTH PENALTY=0.2, Delay Divergen Seqs (%)=30, DNA Transition Weight=0.5, Protein Weight Matrix=Gonnet Series, DNA Weight Matrix=IUB). After alignment of the sequences using the Clustal W program, it is possible to obtain a “percent identity” by viewing the “sequence distances” table in the same program.

[0169] Unless otherwise stated, sequence identity/similarity values provided herein refer to the value obtained using GAP Version 10 (GCG, Accelrys, San Diego, Calif.) using the following parameters: % identity and % similarity for a nucleotide sequence using a gap creation penalty weight of 50 and a gap length extension penalty weight of 3, and the nwsgapdna.cmp scoring matrix; % identity and % similarity for an amino acid sequence using a GAP creation penalty weight of 8 and a gap length extension penalty of 2, and the BLOSUM62 scoring matrix (Henikoff and Henikoff, (1989) Proc. Natl. Acad. Sci. USA 89:10915). GAP uses the algorithm of Needleman and Wunsch, (1970) J Mol Biol 48:443-53, to find an alignment of two complete sequences that maximizes the number of matches and minimizes the number of gaps. GAP considers all possible alignments and gap positions and creates the alignment with the largest number of matched bases and the fewest gaps, using a gap creation penalty and a gap extension penalty in units of matched bases.

[0170] “BLAST” is a searching algorithm provided by the National Center for Biotechnology Information (NCBI) used to find regions of similarity between biological sequences. The program compares nucleotide or protein sequences to sequence databases and calculates the statistical significance of matches to identify sequences having sufficient similarity to a query sequence such that the similarity would not be predicted to have occurred randomly. BLAST reports the identified sequences and their local alignment to the query sequence.

[0171] It is well understood by one skilled in the art that many levels of sequence identity are useful in identifying polypeptides from other species or modified naturally or synthetically wherein such polypeptides have the same or similar function or activity. Useful examples of percent identities include, but are not limited to, 50%, 55%, 60%, 65%, 70%, 75%, 80%, 85%, 90% or 95%, or any integer percentage from 50% to 100%. Indeed, any integer amino acid identity from 50% to 100% may be useful in describing the present disclosure, such as 51%, 52%, 53%, 54%, 55%, 56%, 57%, 58%, 59%, 60%, 61%, 62%, 63%, 64%, 65%, 66%, 67%, 68%, 69%, 70%, 71%, 72%, 73%, 74%, 75%, 76%, 77%, 78%, 79%, 80%, 81%, 82%, 83%, 84%, 85%, 86%, 87%, 88%, 89%, 90%, 91%, 92%, 93%, 94%, 95%, 96%, 97%, 98% or 99%.

[0172] “Gene” includes a nucleic acid fragment that expresses a functional molecule such as, but not limited to, a specific protein, including regulatory sequences preceding (5′ non-coding sequences) and following (3′ non-coding sequences) the coding sequence. “Native gene” refers to a gene as found in nature with its own regulatory sequences.

[0173] A “mutated gene” is a gene that has been altered through human intervention. Such a “mutated gene” has a sequence that differs from the sequence of the corresponding non-mutated gene by at least one nucleotide addition, deletion, or substitution. In certain embodiments of the disclosure, the mutated gene comprises an alteration that results from a guide polynucleotide/Cas endonuclease system as disclosed herein. A mutated plant is a plant comprising a mutated gene.

[0174] As used herein, a “targeted mutation” is a mutation in a gene (referred to as the target gene), including a native gene, that was made by altering a target sequence within the target gene using any method known to one skilled in the art, including a method involving a guided Cas endonuclease system as disclosed herein.

[0175] A guide polynucleotide/Cas endonuclease induced targeted mutation can occur in a nucleotide sequence that is located within or outside a genomic target site that is recognized and cleaved by the Cas endonuclease.

[0176] The term “genome” as it applies to a prokaryotic and eukaryotic cell or organism cells encompasses not only chromosomal DNA found within the nucleus, but organelle DNA found within subcellular components (e.g., mitochondria, or plastid) of the cell.

[0177] An “allele” is one of several alternative forms of a gene occupying a given locus on a chromosome. When all the alleles present at a given locus on a chromosome are the same, that plant is homozygous at that locus. If the alleles present at a given locus on a chromosome differ, that plant is heterozygous at that locus.

[0178] “Coding sequence” refers to a polynucleotide sequence which codes for a specific amino acid sequence. “Regulatory sequences” refer to nucleotide sequences located upstream (5′ non-coding sequences), within, or downstream (3′ non-coding sequences) of a coding sequence, and which influence the transcription, RNA processing or stability, or translation of the associated coding sequence. Regulatory sequences include, but are not limited to, promoters, translation leader sequences, 5′ untranslated sequences, 3′ untranslated sequences, introns, polyadenylation target sequences, RNA processing sites, effector binding sites, and stem-loop structures.

[0179] A “codon-modified gene” or “codon-preferred gene” or “codon-optimized gene” is a gene having its frequency of codon usage designed to mimic the frequency of preferred codon usage of the host cell.

[0180] “A plant-optimized nucleotide sequence” is a nucleotide sequence that has been optimized for expression in plants, particularly for increased expression in plants. A plant-optimized nucleotide sequence includes a codon-optimized gene. A plant-optimized nucleotide sequence can be synthesized by modifying a nucleotide sequence encoding a protein such as, for example, a Cas endonuclease as disclosed herein, using one or more plant-preferred codons for improved expression. See, for example, Campbell and Gowri (1990) Plant Physiol. 92:1-11 for a discussion of host-preferred codon usage.

[0181] “A mammalian-optimized nucleotide sequence” is a nucleotide sequence that has been optimized for expression in mammalian cells, particularly for increased expression in mammals. A mammalian-optimized nucleotide sequence includes a codon-optimized gene. A mammalian-optimized nucleotide sequence can be synthesized by modifying a nucleotide sequence encoding a protein such as, for example, a Cas endonuclease as disclosed herein, using one or more mammalian-preferred codons for improved expression.

[0182] Methods are available in the art for synthesizing plant-preferred genes. See, for example, U.S. Pat. Nos. 5,380,831, and 5,436,391, and Murray et al. (1989) Nucleic Acids Res. 17:477-498, herein incorporated by reference. Additional sequence modifications are known to enhance gene expression in a plant host. These include, for example, elimination of: one or more sequences encoding spurious polyadenylation signals, one or more exon-intron splice site signals, one or more transposon-like repeats, and other such well-characterized sequences that may be deleterious to gene expression. The G-C content of the sequence may be adjusted to levels average for a given plant host, as calculated by reference to known genes expressed in the host plant cell. When possible, the sequence is modified to avoid one or more predicted hairpin secondary mRNA structures. Thus, “a plant-optimized nucleotide sequence” of the present disclosure comprises one or more of such sequence modifications.

[0183] A “promoter” is a region of DNA involved in recognition and binding of RNA polymerase and other proteins to initiate transcription. The promoter sequence consists of proximal and more distal upstream elements, the latter elements often referred to as enhancers. An “enhancer” is a DNA sequence that can stimulate promoter activity, and may be an innate element of the promoter or a heterologous element inserted to enhance the level or tissue-specificity of a promoter. Promoters may be derived in their entirety from a native gene, or be composed of different elements derived from different promoters found in nature, and/or comprise synthetic DNA segments. It is understood by those skilled in the art that different promoters may direct the expression of a gene in different tissues or cell types, or at different stages of development, or in response to different environmental conditions. It is further recognized that since in most cases the exact boundaries of regulatory sequences have not been completely defined, DNA fragments of some variation may have identical promoter activity. Promoters that cause a gene to be expressed in most cell types at most times are commonly referred to as “constitutive promoters”.

[0184] It has been shown that certain promoters are able to direct RNA synthesis at a higher rate than others. These are called “strong promoters”. Certain other promoters have been shown to direct RNA synthesis at higher levels only in particular types of cells or tissues and are often referred to as “tissue specific promoters”, or “tissue-preferred promoters” if the promoters direct RNA synthesis preferably in certain tissues but also in other tissues at reduced levels.

[0185] A plant promoter includes a promoter capable of initiating transcription in a plant cell. For a review of plant promoters, see, Potenza et al., 2004, In Vitro Cell Dev Biol 40:1-22; Porto et al., 2014, Molecular Biotechnology (2014), 56(1), 38-49.

[0186] Constitutive promoters include, for example, the core CaMV 35S promoter (Odell et al., (1985) Nature 313:810-2); rice actin (McElroy et al., (1990) Plant Cell 2:163-71); ubiquitin (Christensen et al., (1989) Plant Mol Biol 12:619-32; ALS promoter (U.S. Pat. No. 5,659,026) and the like.

[0187] Tissue-preferred promoters can be utilized to target enhanced expression within a particular plant tissue. Tissue-preferred promoters include, for example, WO2013/103367 published on 11 Jul. 2013, Kawamata et al., (1997) Plant Cell Physiol 38:792-803; Hansen et al., (1997) Mol Gen Genet 254:337-43; Russell et al., (1997) Transgenic Res 6:157-68; Rinehart et al., (1996) Plant Physiol 112:1331-41; Van Camp et al., (1996) Plant Physiol 112:525-35; Canevascini et al., (1996) Plant Physiol 112:513-524; Lam, (1994) Results Probl Cell Differ 20:181-96; and Guevara-Garcia et al., (1993) Plant J 4:495-505. Leaf-preferred promoters include, for example, Yamamoto et al., (1997) Plant J 12:255-65; Kwon et al., (1994) Plant Physiol 105:357-67; Yamamoto et al., (1994) Plant Cell Physiol 35:773-8; Gotor et al., (1993) Plant J 3:509-18; Orozco et al., (1993) Plant Mol Biol 23:1129-38; Matsuoka et al., (1993) Proc. Natl. Acad. Sci. USA 90:9586-90; Simpson et al., (1958) EMBO J 4:2723-9; Timko et al., (1988) Nature 318:57-8. Root-preferred promoters include, for example, Hire et al., (1992) Plant Mol Biol 20:207-18 (soybean root-specific glutamine synthase gene); Miao et al., (1991) Plant Cell 3:11-22 (cytosolic glutamine synthase (GS)); Keller and Baumgartner, (1991) Plant Cell 3:1051-61 (root-specific control element in the GRP 1.8 gene of French bean); Sanger et al., (1990) Plant Mol Biol 14:433-43 (root-specific promoter of A. tumefaciens mannopine synthase (MAS)); Bogusz et al., (1990) Plant Cell 2:633-41 (root-specific promoters isolated from Parasponia andersonii and Trema tomentosa); Leach and Aoyagi, (1991) Plant Sci 79:69-76 (A. rhizogenes roIC and roID root-inducing genes); Teeri et al., (1989) EMBO J 8:343-50 (Agrobacterium wound-induced TR1′ and TR2′ genes); VfENOD-GRP3 gene promoter (Kuster et al., (1995) Plant Mol Biol 29:759-72); and rolB promoter (Capana et al., (1994) Plant Mol Biol 25:681-91; phaseolin gene (Murai et al., (1983) Science 23:476-82; Sengopta-Gopalen et al., (1988) Proc. Natl. Acad. Sci. USA 82:3320-4). See also, U.S. Pat. Nos. 5,837,876; 5,750,386; 5,633,363; 5,459,252; 5,401,836; 5,110,732 and 5,023,179.

[0188] Seed-preferred promoters include both seed-specific promoters active during seed development, as well as seed-germinating promoters active during seed germination. See, Thompson et al., (1989) BioEssays 10:108. Seed-preferred promoters include, but are not limited to, Cim1 (cytokinin-induced message); cZ19B1 (maize 19 kDa zein); and milps (myo-inositol-1-phosphate synthase); (WO00/11177; and U.S. Pat. No. 6,225,529). For dicots, seed-preferred promoters include, but are not limited to, bean β-phaseolin, napin, β-conglycinin, soybean lectin, cruciferin, and the like. For monocots, seed-preferred promoters include, but are not limited to, maize 15 kDa zein, 22 kDa zein, 27 kDa gamma zein, waxy, shrunken 1, shrunken 2, globulin 1, oleosin, and nuc1. See also, WO00/12733, where seed-preferred promoters from END1 and END2 genes are disclosed.

[0189] The term “inducible promoter” refers to a promoter that selectively express a coding sequence or functional RNA in response to the presence of an endogenous or exogenous stimulus, for example by chemical compounds (chemical inducers) or in response to environmental, hormonal, chemical, and/or developmental signals. Inducible or regulated promoters include, for example, promoters induced or regulated by light, heat, stress, flooding or drought, salt stress, osmotic stress, phytohormones, wounding, or chemicals such as ethanol, abscisic acid (ABA), jasmonate, salicylic acid, or safeners.

[0190] Chemical inducible (regulated) promoters can be used to modulate the expression of a gene in a prokaryotic and eukaryotic cell or organism through the application of an exogenous chemical regulator. The promoter may be a chemical-inducible promoter, where application of the chemical induces gene expression, or a chemical-repressible promoter, where application of the chemical represses gene expression. Chemical-inducible promoters include, but are not limited to, the maize In2-2 promoter, activated by benzene sulfonamide herbicide safeners (De Veylder et al., (1997) Plant Cell Physiol 38:568-77), the maize GST promoter (GST-II-27, WO93/01294), activated by hydrophobic electrophilic compounds used as pre-emergent herbicides, and the tobacco PR-1a promoter (Ono et al., (2004) Biosci Biotechnol Biochem 68:803-7) activated by salicylic acid. Other chemical-regulated promoters include steroid-responsive promoters (see, for example, the glucocorticoid-inducible promoter (Schena et al., (1991) Proc. Natl. Acad. Sci. USA 88:10421-5; McNellis et al., (1998) Plant J 14:247-257); tetracycline-inducible and tetracycline-repressible promoters (Gatz et al., (1991) Mol Gen Genet 227:229-37; U.S. Pat. Nos. 5,814,618 and 5,789,156).

[0191] Pathogen inducible promoters induced following infection by a pathogen include, but are not limited to those regulating expression of PR proteins, SAR proteins, beta-1,3-glucanase, chitinase, etc.

[0192] A stress-inducible promoter includes the RD29A promoter (Kasuga et al. (1999) Nature Biotechnol. 17:287-91). One of ordinary skill in the art is familiar with protocols for simulating stress conditions such as drought, osmotic stress, salt stress and temperature stress and for evaluating stress tolerance of plants that have been subjected to simulated or naturally-occurring stress conditions.

[0193] Another example of an inducible promoter useful in plant cells, is the ZmCAS1 promoter, described in US patent application, US 2013-0312137A1, published on Nov. 21, 2013, incorporated by reference herein.

[0194] New promoters of various types useful in plant cells are constantly being discovered; numerous examples may be found in the compilation by Okamuro and Goldberg, (1989) In The Biochemistry of Plants, Vol. 115, Stumpf and Conn, eds (New York, N.Y.: Academic Press), pp. 1-82.

[0195] “Translation leader sequence” refers to a polynucleotide sequence located between the promoter sequence of a gene and the coding sequence. The translation leader sequence is present in the mRNA upstream of the translation start sequence. The translation leader sequence may affect processing of the primary transcript to mRNA, mRNA stability or translation efficiency. Examples of translation leader sequences have been described (e.g., Turner and Foster, (1995) Mol Biotechnol 3:225-236).

[0196] “3′ non-coding sequences”, “transcription terminator” or “termination sequences” refer to DNA sequences located downstream of a coding sequence and include polyadenylation recognition sequences and other sequences encoding regulatory signals capable of affecting mRNA processing or gene expression. The polyadenylation signal is usually characterized by affecting the addition of polyadenylic acid tracts to the 3′ end of the mRNA precursor. The use of different 3′ non-coding sequences is exemplified by Ingelbrecht et al., (1989) Plant Cell 1:671-680.

[0197] “RNA transcript” refers to the product resulting from RNA polymerase-catalyzed transcription of a DNA sequence. When the RNA transcript is a perfect complimentary copy of the DNA sequence, it is referred to as the primary transcript or pre-mRNA. A RNA transcript is referred to as the mature RNA or mRNA when it is a RNA sequence derived from post-transcriptional processing of the primary transcript pre-mRNA. “Messenger RNA” or “mRNA” refers to the RNA that is without introns and that can be translated into protein by the cell. “cDNA” refers to a DNA that is complementary to, and synthesized from, an mRNA template using the enzyme reverse transcriptase. The cDNA can be single-stranded or converted into double-stranded form using the Klenow fragment of DNA polymerase I. “Sense” RNA refers to RNA transcript that includes the mRNA and can be translated into protein within a cell or in vitro. “Antisense RNA” refers to an RNA transcript that is complementary to all or part of a target primary transcript or mRNA, and that blocks the expression of a target gene (see, e.g., U.S. Pat. No. 5,107,065). The complementarity of an antisense RNA may be with any part of the specific gene transcript, i.e., at the 5′ non-coding sequence, 3′ non-coding sequence, introns, or the coding sequence. “Functional RNA” refers to antisense RNA, ribozyme RNA, or other RNA that may not be translated but yet has an effect on cellular processes. The terms “complement” and “reverse complement” are used interchangeably herein with respect to mRNA transcripts, and are meant to define the antisense RNA of the message.

[0198] The term “operably linked” refers to the association of nucleic acid sequences on a single nucleic acid fragment so that the function of one is regulated by the other. For example, a promoter is operably linked with a coding sequence when it is capable of regulating the expression of that coding sequence (i.e., the coding sequence is under the transcriptional control of the promoter). Coding sequences can be operably linked to regulatory sequences in a sense or antisense orientation. In another example, the complementary RNA regions can be operably linked, either directly or indirectly, 5′ to the target mRNA, or 3′ to the target mRNA, or within the target mRNA, or a first complementary region is 5′ and its complement is 3′ to the target mRNA.

[0199] Standard recombinant DNA and molecular cloning techniques used herein are well known in the art and are described more fully in Sambrook et al., Molecular Cloning: A Laboratory Manual; Cold Spring Harbor Laboratory: Cold Spring Harbor, NY (1989). Transformation methods are well known to those skilled in the art and are described infra.

[0200] The term “recombinant” refers to an artificial combination of two otherwise separated segments of sequence, e.g., by chemical synthesis, or manipulation of isolated segments of nucleic acids by genetic engineering techniques.

[0201] The terms “plasmid”, “vector” and “cassette” refer to a linear or circular extra chromosomal element often carrying genes that are not part of the central metabolism of the cell, and usually in the form of double-stranded DNA. Such elements may be autonomously replicating sequences, genome integrating sequences, phage, or nucleotide sequences, in linear or circular form, of a single- or double-stranded DNA or RNA, derived from any source, in which a number of nucleotide sequences have been joined or recombined into a unique construction which is capable of introducing a polynucleotide of interest into a cell. “Transformation cassette” refers to a specific vector containing a gene and having elements in addition to the gene that facilitates transformation of a particular host cell. “Expression cassette” refers to a specific vector containing a gene and having elements in addition to the gene that allow for expression of that gene in a host.

[0202] The terms “recombinant DNA molecule”, “recombinant DNA construct”, “expression construct”, “construct”, and “recombinant construct” are used interchangeably herein. A recombinant DNA construct comprises an artificial combination of nucleic acid sequences, e.g., regulatory and coding sequences that are not all found together in nature. For example, a recombinant DNA construct may comprise regulatory sequences and coding sequences that are derived from different sources, or regulatory sequences and coding sequences derived from the same source, but arranged in a manner different than that found in nature. Such a construct may be used by itself or may be used in conjunction with a vector. If a vector is used, then the choice of vector is dependent upon the method that will be used to introduce the vector into the host cells as is well known to those skilled in the art. For example, a plasmid vector can be used. The skilled artisan is well aware of the genetic elements that must be present on the vector in order to successfully transform, select and propagate host cells. The skilled artisan will also recognize that different independent transformation events may result in different levels and patterns of expression (Jones et al., (1985) EMBO J 4:2411-2418; De Almeida et al., (1989) Mol Gen Genetics 218:78-86), and thus that multiple events are typically screened in order to obtain lines displaying the desired expression level and pattern. Such screening may be accomplished standard molecular biological, biochemical, and other assays including Southern analysis of DNA, Northern analysis of mRNA expression, PCR, real time quantitative PCR (qPCR), reverse transcription PCR (RT-PCR), immunoblotting analysis of protein expression, enzyme or activity assays, and/or phenotypic analysis.

[0203] The term “expression”, as used herein, refers to the production of a functional end-product (e.g., an mRNA, guide RNA, or a protein) in either precursor or mature form.

[0204] “Mature” protein refers to a post-translationally processed polypeptide (i.e., one from which any pre- or propeptides present in the primary translation product have been removed). “Precursor” protein refers to the primary product of translation of mRNA (i.e., with pre- and propeptides still present). Pre- and propeptides may be but are not limited to intracellular localization signals.

[0205] The presently disclosed guide polynucleotides, Cas endonucleases, polynucleotide modification templates, donor DNAs, guide polynucleotide/Cas endonuclease systems and any one combination thereof, can be introduced into a cell.

[0206] Cells include, but are not limited to, mammalian, human, non-human, animal, bacterial, fungal, insect, yeast, non-conventional yeast, and plant cells as well as plants and seeds produced by the methods described herein.

[0207] Any plant or plant part can be used, including monocot and dicot plants or plant part.

[0208] Examples of monocot plants that can be used include, but are not limited to, corn (Zea mays), rice (Oryza sativa), rye (Secale cereale), sorghum (Sorghum bicolor, Sorghum vulgare), millet (e.g., pearl millet (Pennisetum glaucum), proso millet (Panicum miliaceum), foxtail millet (Setaria italica), finger millet (Eleusine coracana)), wheat (Triticum species, Triticum aestivum, Triticum monococcum), sugarcane (Saccharum spp.), oats (Avena), barley (Hordeum), switchgrass (Panicum virgatum), pineapple (Ananas comosus), banana (Musa spp.), palm, ornamentals, turfgrasses, and other grasses.

[0209] The term “dicotyledonous” or “dicot” refers to the subclass of angiosperm plants also knows as “dicotyledoneae” and includes reference to whole plants, plant organs (e.g., leaves, stems, roots, etc.), seeds, plant cells, and progeny of the same. Examples of dicot plants that can be used include, but are not limited to, soybean (Glycine max), Brassica species (Canola) (Brassica napus, B. campestris, Brassica rapa, Brassica. juncea), alfalfa (Medicago sativa),), alfalfa (Medicago sativa), tobacco (Nicotiana tabacum), Arabidopsis (Arabidopsis thaliana), sunflower (Helianthus annuus), cotton (Gossypium arboreum, Gossypium barbadense), and peanut (Arachis hypogaea), tomato (Solanum lycopersicum), potato (Solanum tuberosum.

[0210] Plant that can be used include safflower (Carthamus tinctorius), sweet potato (Ipomoea batatus), cassava (Manihot esculenta), coffee (Coffea spp.), coconut (Cocos nucifera), citrus trees (Citrus spp.), cocoa (Theobroma cacao), tea (Camellia sinensis), banana (Musa spp.), avocado (Persea americana), fig (Ficus casica), guava (Psidium guajava), mango (Mangifera indica), olive (Olea europaea), papaya (Carica papaya), cashew (Anacardium occidentale), macadamia (Macadamia integrifolia), almond (Prunus amygdalus), sugar beets (Beta vulgaris), vegetables, ornamentals, and conifers.

[0211] Vegetables include tomatoes (Lycopersicon esculentum), lettuce (e.g., Lactuca sativa), green beans (Phaseolus vulgaris), lima beans (Phaseolus limensis), peas (Lathyrus spp.), and members of the genus Cucumis such as cucumber (C. sativus), cantaloupe (C. cantalupensis), and musk melon (C. melo). Ornamentals include azalea (Rhododendron spp.), hydrangea (Macrophylla hydrangea), hibiscus (Hibiscus rosasanensis), roses (Rosa spp.), tulips (Tulipa spp.), daffodils (Narcissus spp.), petunias (Petunia hybrida), carnation (Dianthus caryophyllus), poinsettia (Euphorbia pulcherrima), and chrysanthemum.

[0212] Conifers that may be employed in practicing the present invention include, for example, pines such as loblolly pine (Pinus taeda), slash pine (Pinus elliotii), ponderosa pine (Pinus ponderosa), lodgepole pine (Pinus contorta), and Monterey pine (Pinus radiata); Douglas fir (Pseudotsuga menziesii); Western hemlock (Tsuga canadensis); Sitka spruce (Picea glauca); redwood (Sequoia sempervirens); true firs such as silver fir (Abies amabilis) and balsam fir (Abies balsamea); and cedars such as Western red cedar (Thuja plicata) and Alaska yellow cedar (Chamaecyparis nootkatensis).

[0213] The term “plant” includes whole plants, plant organs, plant tissues, seeds, plant cells, seeds and progeny of the same. Plant cells include, without limitation, cells from seeds, suspension cultures, embryos, meristematic regions, callus tissue, leaves, roots, shoots, gametophytes, sporophytes, pollen and microspores. Plant parts include differentiated and undifferentiated tissues including, but not limited to roots, stems, shoots, leaves, pollens, seeds, tumor tissue and various forms of cells and culture (e.g., single cells, protoplasts, embryos, and callus tissue). The plant tissue may be in plant or in a plant organ, tissue or cell culture. The term “plant organ” refers to plant tissue or a group of tissues that constitute a morphologically and functionally distinct part of a plant. The term “genome” refers to the entire complement of genetic material (genes and non-coding sequences) that is present in each cell of an organism, or virus or organelle; and/or a complete set of chromosomes inherited as a (haploid) unit from one parent. “Progeny” comprises any subsequent generation of a plant.

[0214] As used herein, the term “plant part” refers to plant cells, plant protoplasts, plant cell tissue cultures from which plants can be regenerated, plant calli, plant clumps, and plant cells that are intact in plants or parts of plants such as embryos, pollen, ovules, seeds, leaves, flowers, branches, fruit, kernels, ears, cobs, husks, stalks, roots, root tips, anthers, and the like, as well as the parts themselves. Grain is intended to mean the mature seed produced by commercial growers for purposes other than growing or reproducing the species. Progeny, variants, and mutants of the regenerated plants are also included within the scope of the invention, provided that these parts comprise the introduced polynucleotides.

[0215] A transgenic plant includes, for example, a plant which comprises within its genome a heterologous polynucleotide introduced by a transformation step. The heterologous polynucleotide can be stably integrated within the genome such that the polynucleotide is passed on to successive generations. The heterologous polynucleotide may be integrated into the genome alone or as part of a recombinant DNA construct. A transgenic plant can also comprise more than one heterologous polynucleotide within its genome. Each heterologous polynucleotide may confer a different trait to the transgenic plant. A heterologous polynucleotide can include a sequence that originates from a foreign species, or, if from the same species, can be substantially modified from its native form. Transgenic can include any cell, cell line, callus, tissue, plant part or plant, the genotype of which has been altered by the presence of heterologous nucleic acid including those transgenics initially so altered as well as those created by sexual crosses or asexual propagation from the initial transgenic. The alterations of the genome (chromosomal or extra-chromosomal) by conventional plant breeding methods, by the genome editing procedure described herein that does not result in an insertion of a foreign polynucleotide, or by naturally occurring events such as random cross-fertilization, non-recombinant viral infection, non-recombinant bacterial transformation, non-recombinant transposition, or spontaneous mutation are not intended to be regarded as transgenic.

[0216] In certain embodiments of the disclosure, a fertile plant is a plant that produces viable male and female gametes and is self-fertile. Such a self-fertile plant can produce a progeny plant without the contribution from any other plant of a gamete and the genetic material contained therein. Other embodiments of the disclosure can involve the use of a plant that is not self-fertile because the plant does not produce male gametes, or female gametes, or both, that are viable or otherwise capable of fertilization. As used herein, a “male sterile plant” is a plant that does not produce male gametes that are viable or otherwise capable of fertilization. As used herein, a “female sterile plant” is a plant that does not produce female gametes that are viable or otherwise capable of fertilization. It is recognized that male-sterile and female-sterile plants can be female-fertile and male-fertile, respectively. It is further recognized that a male fertile (but female sterile) plant can produce viable progeny when crossed with a female fertile plant and that a female fertile (but male sterile) plant can produce viable progeny when crossed with a male fertile plant.

[0217] The term “non-conventional yeast” herein refers to any yeast that is not a Saccharomyces (e.g., S. cerevisiae) or Schizosaccharomyces yeast species. (see Non-Conventional Yeasts in Genetics, Biochemistry and Biotechnology: Practical Protocols” (K. Wolf, K. D. Breunig, G. Barth, Eds., Springer-Verlag, Berlin, Germany, 2003).

[0218] The term “crossed” or “cross” or “crossing” in the context of this disclosure means the fusion of gametes via pollination to produce progeny (i.e., cells, seeds, or plants). The term encompasses both sexual crosses (the pollination of one plant by another) and selfing (self-pollination, i.e., when the pollen and ovule (or microspores and megaspores) are from the same plant or genetically identical plants).

[0219] The term “introgression” refers to the transmission of a desired allele of a genetic locus from one genetic background to another. For example, introgression of a desired allele at a specified locus can be transmitted to at least one progeny plant via a sexual cross between two parent plants, where at least one of the parent plants has the desired allele within its genome. Alternatively, for example, transmission of an allele can occur by recombination between two donor genomes, e.g., in a fused protoplast, where at least one of the donor protoplasts has the desired allele in its genome. The desired allele can be, e.g., a transgene, a modified (mutated or edited) native allele, or a selected allele of a marker or QTL.

[0220] A “centimorgan” (cM) or “map unit” is the distance between two linked genes, markers, target sites, loci, or any pair thereof, wherein 1% of the products of meiosis are recombinant. Thus, a centimorgan is equivalent to a distance equal to a 1% average recombination frequency between the two linked genes, markers, target sites, loci, or any pair thereof.

[0221] The present disclosure finds use in the breeding of plants comprising one or more introduced traits.

[0222] Maize plants (Zea mays L.) can be bred by both self-pollination and cross-pollination techniques. Maize has male flowers, located on the tassel, and female flowers, located on the ear, on the same plant. It can self-pollinate (“selfing”) or cross pollinate. Natural pollination occurs in maize when wind blows pollen from the tassels to the silks that protrude from the tops of the incipient ears. Pollination may be readily controlled by techniques known to those of skill in the art. The development of maize hybrids requires the development of homozygous inbred lines, the crossing of these lines, and the evaluation of the crosses. Pedigree breeding and recurrent selections are two of the breeding methods used to develop inbred lines from populations. Breeding programs combine desirable traits from two or more inbred lines or various broad-based sources into breeding pools from which new inbred lines are developed by selfing and selection of desired phenotypes. A hybrid maize variety is the cross of two such inbred lines, each of which may have one or more desirable characteristics lacked by the other or which complement the other. The new inbreds are crossed with other inbred lines and the hybrids from these crosses are evaluated to determine which have commercial potential. The hybrid progeny of the first generation is designated F1. The F1 hybrid is more vigorous than its inbred parents. This hybrid vigor, or heterosis, can be manifested in many ways, including increased vegetative growth and increased yield.

[0223] Hybrid maize seed can be produced by a male sterility system incorporating manual detasseling. To produce hybrid seed, the male tassel is removed from the growing female inbred parent, which can be planted in various alternating row patterns with the male inbred parent. Consequently, providing that there is sufficient isolation from sources of foreign maize pollen, the ears of the female inbred will be fertilized only with pollen from the male inbred. The resulting seed is therefore hybrid (F1) and will form hybrid plants.

[0224] Field variation impacting plant development can result in plants tasseling after manual detasseling of the female parent is completed. Or, a female inbred plant tassel may not be completely removed during the detasseling process. In any event, the result is that the female plant will successfully shed pollen and some female plants will be self-pollinated. This will result in seed of the female inbred being harvested along with the hybrid seed which is normally produced. Female inbred seed does not exhibit heterosis and therefore is not as productive as F1 seed. In addition, the presence of female inbred seed can represent a germplasm security risk for the company producing the hybrid.

[0225] Alternatively, the female inbred can be mechanically detasseled by machine. Mechanical detasseling is approximately as reliable as hand detasseling, but is faster and less costly. However, most detasseling machines produce more damage to the plants than hand detasseling. Thus, no form of detasseling is presently entirely satisfactory, and a need continues to exist for alternatives which further reduce production costs and to eliminate self-pollination of the female parent in the production of hybrid seed.

[0226] Mutations that cause male sterility in plants have the potential to be useful in methods for hybrid seed production for crop plants such as maize and can lower production costs by eliminating the need for the labor-intensive removal of male flowers (also known as de-tasseling) from the maternal parent plants used as a hybrid parent. Examples of genes used in such ways include male fertility genes such as MS26 (see for example U.S. Pat. Nos. 7,098,388, 7,517,975, 7,612,251), MS45 (see for example U.S. Pat. Nos. 5,478,369, 6,265,640) or MSCA1 (see for example U.S. Pat. No. 7,919,676).

[0227] Mutations that cause male sterility in maize have been produced by a variety of methods such as X-rays or UV-irradiations, chemical treatments, or transposable element insertions (ms23, ms25, ms26, ms32) (Chaubal et al. (2000) Am J Bot 87:1193-1201). Conditional regulation of fertility genes through fertility/sterility “molecular switches” could enhance the options for designing new male-sterility systems for crop improvement (Unger et al. (2002) Transgenic Res 11:455-465).

[0228] Chromosomal intervals that correlate with a phenotype or trait of interest can be identified. A variety of methods well known in the art are available for identifying chromosomal intervals. The boundaries of such chromosomal intervals are drawn to encompass markers that will be linked to the gene controlling the trait of interest. In other words, the chromosomal interval is drawn such that any marker that lies within that interval (including the terminal markers that define the boundaries of the interval) can be used as a marker for northern leaf blight resistance. In one embodiment, the chromosomal interval comprises at least one QTL, and furthermore, may indeed comprise more than one QTL. Close proximity of multiple QTLs in the same interval may obfuscate the correlation of a particular marker with a particular QTL, as one marker may demonstrate linkage to more than one QTL. Conversely, e.g., if two markers in close proximity show co-segregation with the desired phenotypic trait, it is sometimes unclear if each of those markers identifies the same QTL or two different QTL. The term “quantitative trait locus” or “QTL” refers to a region of DNA that is associated with the differential expression of a quantitative phenotypic trait in at least one genetic background, e.g., in at least one breeding population. The region of the QTL encompasses or is closely linked to the gene or genes that affect the trait in question. An “allele of a QTL” can comprise multiple genes or other genetic factors within a contiguous genomic region or linkage group, such as a haplotype. An allele of a QTL can denote a haplotype within a specified window wherein said window is a contiguous genomic region that can be defined, and tracked, with a set of one or more polymorphic markers. A haplotype can be defined by the unique fingerprint of alleles at each marker within the specified window.

[0229] A variety of methods are available to identify those cells having an altered genome at or near a target site without using a screenable marker phenotype. Such methods can be viewed as directly analyzing a target sequence to detect any change in the target sequence, including but not limited to PCR methods, sequencing methods, nuclease digestion, Southern blots, and any combination thereof.

[0230] Proteins may be altered in various ways including amino acid substitutions, deletions, truncations, and insertions. Methods for such manipulations are generally known. For example, amino acid sequence variants of the protein(s) can be prepared by mutations in the DNA. Methods for mutagenesis and nucleotide sequence alterations include, for example, Kunkel, (1985) Proc. Natl. Acad. Sci. USA 82:488-92; Kunkel et al., (1987) Meth Enzymol 154:367-82; U.S. Pat. No. 4,873,192; Walker and Gaastra, eds. (1983) Techniques in Molecular Biology (MacMillan Publishing Company, New York) and the references cited therein. Guidance regarding amino acid substitutions not likely to affect biological activity of the protein is found, for example, in the model of Dayhoff et al., (1978) Atlas of Protein Sequence and Structure (Natl Biomed Res Found, Washington, D.C.). Conservative substitutions, such as exchanging one amino acid with another having similar properties, may be preferable. Conservative deletions, insertions, and amino acid substitutions are not expected to produce radical changes in the characteristics of the protein, and the effect of any substitution, deletion, insertion, or combination thereof can be evaluated by routine screening assays. Assays for double-strand-break-inducing activity are known and generally measure the overall activity and specificity of the agent on DNA substrates containing target sites.

[0231] Standard DNA isolation, purification, molecular cloning, vector construction, and verification/characterization methods are well established, see, for example Sambrook et al., (1989) Molecular Cloning: A Laboratory Manual, (Cold Spring Harbor Laboratory Press, NY). Vectors and constructs include circular plasmids, and linear polynucleotides, comprising a polynucleotide of interest and optionally other components including linkers, adapters, regulatory or analysis. In some examples a recognition site and/or target site can be contained within an intron, coding sequence, 5′ UTRs, 3′ UTRs, and/or regulatory regions.

[0232] The meaning of abbreviations is as follows: “sec” means second(s), “min” means minute(s), “h” means hour(s), “d” means day(s), “μL” means microliter(s), “mL” means milliliter(s), “L” means liter(s), “μM” means micromolar, “mM” means millimolar, “M” means molar, “mmol” means millimole(s), “μmole” mean micromole(s), “g” means gram(s), “μg” means microgram(s), “ng” means nanogram(s), “U” means unit(s), “bp” means base pair(s) and “kb” means kilobase(s).

[0233] Non-limiting examples of compositions and methods disclosed herein are as follows:

1. A guide RNA/Cas endonuclease complex comprising at least one guide RNA and a Cas endonuclease, wherein said Cas endonuclease comprises a first nuclease domain of SEQ ID NO: 88, and a second nuclease domain comprising at least one nuclease subdomain selected from the group consisting of SEQ ID NO: 90, SEQ ID NO: 92 and SEQ ID NO: 94, wherein said guide RNA is a chimeric engineered guide RNA, wherein said guide RNA/Cas endonuclease complex is capable of recognizing, binding to, and optionally nicking, cleaving, or covalently attaching to all or part of a target sequence.
2. The guide RNA/Cas endonuclease complex of embodiment 1, wherein said Cas endonuclease has at least 80% sequence identity to SEQ ID NO: 1.
3. The guide RNA/Cas endonuclease complex of embodiments 1-2 comprising at least one chimeric engineered guide RNA comprising a variable targeting domain that can recognize a target DNA in a eukaryotic cell.
4. The guide RNA/Cas endonuclease complex of embodiments 1-2, wherein said target sequence is located in the genome of a prokaryotic or eukaryotic cell.
5. A method for modifying a target site in the genome of a cell, the method comprising introducing into said cell at least one chimeric engineered guide RNA, and a Cas endonuclease comprising a first nuclease domain of SEQ ID NO: 88, and a second nuclease domain comprising at least one nuclease sub-domain selected from the group consisting of SEQ ID NO: 90, SEQ ID NO: 92 and SEQ ID NO: 94, wherein said chimeric engineered guide RNA and Cas endonuclease can form a complex that is capable of recognizing, binding to, and optionally nicking, cleaving, or covalently attaching to all or part of said target site.
6. The method of embodiment 5, further comprising identifying at least one cell that has a modification at said target, wherein the modification at said target site is selected from the group consisting of (i) a replacement of at least one nucleotide, (ii) a deletion of at least one nucleotide, (iii) an insertion of at least one nucleotide, and (iv) any combination of (i)-(iii).
7. A method for editing a nucleotide sequence in the genome of a cell, the method comprising introducing into said cell at least one polynucleotide modification template, at least one chimeric engineered guide RNA, and a Cas endonuclease comprising a first nuclease domain of SEQ ID NO: 88, and a second nuclease domain comprising at least one nuclease sub-domain selected from the group consisting of SEQ ID NO: 90, SEQ ID NO: 92 and SEQ ID NO: 94, wherein said polynucleotide modification template comprises at least one nucleotide modification of said nucleotide sequence, wherein said chimeric engineered guide RNA and Cas endonuclease can form a complex that is capable of recognizing, binding to, and optionally nicking, cleaving, or covalently attaching to all or part of said target site.
8. A method for modifying a target site in the genome of a cell, the method comprising providing to said cell at least one chimeric engineered guide RNA, at least one donor DNA, and a Cas endonuclease comprising a first nuclease domain of SEQ ID NO: 88, and a second nuclease domain comprising at least one nuclease sub-domain selected from the group consisting of SEQ ID NO: 90, SEQ ID NO: 92 and SEQ ID NO: 94, wherein said at least one chimeric engineered guide RNA and Cas endonuclease can form a complex that is capable of recognizing, binding to, and optionally nicking, cleaving, or covalently attaching to all or part of said target site, wherein said donor DNA comprises a polynucleotide of interest.
9. The method of embodiment 8, further comprising identifying at least one cell that said polynucleotide of interest integrated in or near said target site.
10. The method of any one of embodiments 5-9, wherein the cell is selected from the group consisting of a prokaryotic or eukaryotic cell.
11. The method of any one of embodiments 5-9, wherein the cell is selected from the group consisting of a mammalian, human cell, non-human cell, animal cell, bacterial cell, fungal cell, insect cell, yeast cell, non-conventional yeast cell, and a plant cell.
12. The method of embodiment 11, wherein the plant cell is selected from the group consisting of a monocot and dicot cell.
13. The method of embodiment 12 wherein the plant cell is selected from the group consisting of maize, rice, sorghum, rye, barley, wheat, millet, oats, sugarcane, turfgrass, or switchgrass, soybean, canola, alfalfa, sunflower, cotton, tobacco, peanut, potato, tobacco, Arabidopsis, and safflower cell.
14. A plant comprising a modified target site, wherein said plant originates from a plant cell comprising a modified target site produced by the method of any one of embodiments 5-6.
15. A plant comprising an edited nucleotide, wherein said plant originates from a plant cell comprising an edited nucleotide produced by the method of embodiment 7.
16. A plant comprising a polynucleotide of interest, wherein said plant originates from a plant cell comprising a polynucleotide of interest produced by the method of any one of embodiments 8-9.
17. A recombinant DNA polynucleotide comprising a promoter operably linked to a plant-optimized polynucleotide encoding a Cas endonuclease, wherein said Cas endonuclease comprises a first nuclease domain of SEQ ID NO: 88, and a second nuclease domain comprising at least one nuclease sub-domain selected from the group consisting of SEQ ID NO: 90, SEQ ID NO: 92 and SEQ ID NO: 94.
18. A kit for binding, cleaving or nicking a target sequence in a prokaryotic or eukaryotic cell or organism, said kit comprising a guide polynucleotide specific for said target sequence, and a Cas endonuclease or a polynucleotide encoding said Cas endonuclease, wherein said Cas endonuclease comprises a first nuclease domain of SEQ ID NO: 88, and a second nuclease domain comprising at least one nuclease sub-domain selected from the group consisting of SEQ ID NO: 90, SEQ ID NO: 92 and SEQ ID NO: 94, wherein said guide polynucleotide is capable of forming a guide polynucleotide/Cas endonuclease complex, wherein said complex can recognize, bind to, and optionally nick or cleave said target sequence.
19. A guide RNA/Cas endonuclease complex comprising at least one chimeric engineered guide RNA and a Cas endonuclease, wherein said Cas endonuclease comprises a first nuclease domain of SEQ ID NO: 88 or a functional fragment of SEQ ID NO: 88, and a second nuclease domain comprising at least one nuclease sub-domain selected from the group consisting of SEQ ID NO: 90, SEQ ID NO: 92 and SEQ ID NO: 94, or a functional fragment of said second domain, wherein said guide RNA/Cas endonuclease complex is capable of recognizing, binding to, and optionally nicking, cleaving, or covalently attaching to all or part of a target sequence.
20. A guide RNA/Cas endonuclease complex comprising at least one chimeric engineered guide RNA and a Cas endonuclease comprising at least one nuclease domain or subdomain selected from the group consisting of SEQ ID NO: 88, wherein said guide RNA/Cas endonuclease complex is capable of recognizing, binding to, and optionally nicking, cleaving, or covalently attaching to all or part of a target sequence.
21. A guide RNA/Cas endonuclease complex comprising a Cas endonuclease of SEQ ID NO: 1, or a functional fragment thereof, and at least one chimeric engineered guide RNA, wherein said guide RNA/Cas endonuclease complex is capable of recognizing, binding to, and optionally nicking, cleaving, or covalently attaching to all or part of a target sequence
22. A guide RNA/Cas endonuclease complex comprising at least one chimeric engineered guide RNA and a Cas endonuclease, wherein said Cas endonuclease is encoded by a codon optimized sequence of SEQ ID NO: 97, wherein said guide RNA/Cas endonuclease complex is capable of recognizing, binding to, and optionally nicking, cleaving, or covalently attaching to all or part of a target sequence.
23. A recombinant DNA polynucleotide comprising a promoter operably linked to a plant-optimized polynucleotide encoding a Lapis Cas endonuclease.
24. A kit for binding, cleaving or nicking a target sequence in a plant cell or plant, said kit comprising a guide polynucleotide specific for said target sequence, and a Lapis Cas endonuclease or a plant-optimized polynucleotide encoding a Lapis Cas endonuclease, wherein said guide polynucleotide is capable of forming a guide polynucleotide/Lapis Cas endonuclease complex, wherein said complex can recognize, bind to, and optionally nick or cleave said target sequence.
25. A chimeric engineered guide RNA capable of forming a guide RNA/Cas endonuclease complex that can recognize, bind to, and optionally nick, cleave, or covalently attach to a target sequence, wherein said guide RNA is selected from the group consisting of SEQ ID NOs: 128-138.

### EXAMPLES

[0234] In the following Examples, unless otherwise stated, parts and percentages are by weight and degrees are Celsius. It should be understood that these Examples, while indicating embodiments of the disclosure, are given by way of illustration only. From the above discussion and these Examples, one skilled in the art can make various changes and modifications of the disclosure to adapt it to various usages and conditions. Such modifications are also intended to fall within the scope of the appended claims.

### Example 1

### Identification of CRISPR Associated (Cas) Endonucleases with Novel Cleavage Domains

[0235] Cas endonucleases with novel cleavage domains were identified by first searching for the presence of clustered regularly interspaced short palindromic repeats (CRISPRs) indicative of the CRISPR-Cas nucleic acid based adaptive immune systems of bacteria and archaea (Bhaya et al. (2011) Annual Review Genetics, 45:273-297; Wiedenheft et al. (2012) Nature, 482:331-338) using PILER-CR (Edgar R. (2007) BMC Bioinformatics 8:18). Next, the DNA regions surrounding the CRISPR array (about 20 kb 5 prime and 3 prime of the CRISPR array) were examined for the presence of open-reading frames (ORFs) encoding proteins greater than 500 amino acids. Next, to identify CRISPR associated genes encoding homology to Cas9 endonucleases, multiple sequence alignment of protein sequences from a diverse collection of Cas9 endonucleases was performed using MUSCLE (Edgar R. (2004) Nucleic Acids Research, 32(5): 1792-97). The alignments were examined, curated and used to build profile hidden Markov models (HMM) for Cas9 sub-families using HMMER (Eddy S. R. (1998) Bioinformatics, 14:755-763; Eddy S. R. (2011) PLoS Comp. Biol., 7:e1002195). The resulting HMM models were then utilized to search protein sequences translated from the CRISPR associated ORFs for the presence of cas genes with homology to Cas9. Once identified, the resulting proteins were then examined for the presence of novel cleavage domains. This was accomplished by searching for the absence of a HNH or related DNA cleavage domains (e.g. cysHNH, HNN, or cysHNN) as defined in Kuhlmann et al. (1999) FEBS Letters 463:1-2, Aravind et al. (2000) Nucleic Acid Research 28:3417-3432, Mate et al. (2004) The Journal of Biological Chemistry 279:34763-34769, Keeble et al. (2005) Nucleic Acids and Molecular Biology 16:49-65, Biertumpfel et al. (2007) Nature 449:616-620 and Nishimasu et al. (2014) Cell 156:935-949 or RuvC or related DNA cleavage domains as defined in Ariyoshi et al. (1994) Cell 78:1063-1072, Aravind et al. (2000) and Nishimasu et al. (2014).

[0236] Interestingly, our search revealed the presence of a novel Cas protein from Lactobacillus apis (referred herein as Lapis) lacking the signature residues of a HNH endonuclease domain (see Kuhlmann et al. (1999), Aravind et al. (2000), Mate et al. (2004), Keeble et al. (2005), Biertumpfel et al. (2007) and Nishimasu et al. (2014) for descriptions of signature HNH domains). An alignment of the novel protein sequence of Lapis (referred herein as Lapis Cas; SEQ ID NO: 1) with a collection of 86 diverse Cas9 proteins whose phylogenetic relationship were reported in Fonfara et al. (2014) Nucleic Acids Research 42:2577-2590 (SEQ ID NO: 2-87), revealed that the key domain involved in the catalytic activity of the HNH motif of other Cas9 proteins was significantly different than the corresponding region in the Lapis protein (FIG. 1). Specifically, the Cas protein from Lapis (SEQ ID NO: 1) lacked the absolutely conserved histidine residue (H, His) which serves as a base to activate a water molecule for catalysis and is foundational to the cleavage mechanism of all HNH domains (Kuhlmann et al. (1999), Aravind et al. (2000), Mate et al. (2004), Keeble et al. (2005), Biertumpfel et al. (2007) and Nishimasu et al. (2014)) (FIG. 1). Additionally, the aspartic acid (D, Asp) residue typical for Cas9 endonucleases (for example Asp839 in Streptococcus pyogenes (Spy) Cas9 (SEQ ID NO: 2) which helps to coordinate a metal ion has been substituted with an arginine (ft Arg) (FIG. 1). Taken together, this analysis and results indicate that the Cas protein of Lactobacillus apis (Lapis) identified herein (referred to as LapisCas) does not contain an HNH nucleolytic domain, and instead contains a novel protein cleavage domain (SEQ ID NO: 88).

[0237] Analysis of the RuvC cleavage domain typical for Cas9 endonucleases (Gasiunas et al., 2012, Proc Natl Acad Sci USA. 109:E2579-2586; Jinek et al., 2012, Science. 337: 816-821; and Nishimasu et al., 2014 Cell, 156(5):935-949) in the Lactobacillus apis Cas (Lapis Cas) protein likewise revealed modifications that place it outside the definition of a RuvC cleavage domain (Ariyoshi et al. (1994), Aravind et al. 2000 and Nishimasu et al. (2014)). As shown in FIGS. 2-4, the most striking changes in the Lapis Cas protein when compared to the Cas9 RuvC domain were alterations in the acidic residues that traditionally co-coordinate metal ions responsible for facilitating DNA cleavage. As demonstrated herein (FIGS. 2 and 3), two of the four key residues typical for a RuvC domain, an aspartic acid (D, Asp) (for example Asp10 in Spy Cas9 (SEQ ID NO:2)) and a glutamic acid (E, Glu) (for example Glu762 in Spy Cas9 (SEQ ID NO:2)) which is conserved in RuvC domains of all other proteins (Ariyoshi et al. (1994) and Aravind et al. 2000), were replaced by serines (S, Ser) in the Lapis Cas protein (Ser13 and Ser799; SEQ ID NO:1). Additionally, a histidine residue present in most other Cas9s (for example His983 in Spy Cas9 (SEQ ID NO: 2)) has been replaced by an asparagine (N, Asn) in the Lapis Cas protein (FIG. 4). Taken together, this suggests that the Lapis Cas protein identified herein does not contain an RuvC nucleolytic domain and instead contains novel protein cleavage domains (SEQ ID NOs: 90, 92 and 94).

[0238] Next, the CRISPR-Cas locus architecture containing the novel Cas protein from Lactobacillus apis (Lapis) was examined as described below. The presence or absence of cas1 and cas2 genes were confirmed by comparing protein translations of ORFs 201 nucleotides within the CRISPR-Cas locus of Lapis (SEQ ID NO: 96) against the NCBI protein database for those matching known Cas1 and Cas2 proteins using the PSI-BLAST program (Altschul S F, et al. (1997) Nucleic Acids Res. 25:3389-3402). Additional CRISPR repeats missed by the PILER-CR program (Edgar R. (2007)) were identified by performing pairwise alignments of the locus with the CRISPR array repeat consensus (Altschul S F, et al. (1997)). The putative tracrRNA encoding region, termed the anti-repeat, was established by searching the locus for regions (distinct from the CRISPR array) with complete to partial homology to the repeats in the CRISPR array (as described in U.S. patent applications 62/162,377 filed May 15, 2015, 62/162,353 filed May 15, 2015 and 62/196,535 filed Jul. 24, 2015, all three applications incorporated in their entirety herein by reference). Once the anti-repeat was identified, the possible transcriptional directions of the tracrRNA was considered by examining the secondary structures and possible termination signals present in a RNA version of the sense and anti-sense genomic DNA sequences surrounding the anti-repeat (as described in U.S. patent applications 62/162,377 filed May 15, 2015, 62/162,353 filed May 15, 2015 and 62/196,535 filed Jul. 24, 2015, all three applications incorporated in their entirety herein by reference).

[0239] Surprisingly, no cas1 and cas2 genes were identified in the proximity of the Lapis cas gene distinguishing it from Type II CRISPR-Cas systems being minimally comprised of a tracrRNA encoding region, a cas9 gene, a cas1 gene, a cas2 gene, and a CRISPR array (Makarova et al. (2015) Nat. Rev. Microbiol. 13:722-736) (FIG. 5). Additionally, the Lapis CRISPR array identified herein is apparently organized into 6 dispersed groupings with the tracrRNA-like encoding region being duplicated immediately 5 prime of each array (FIG. 5). Furthermore, five additional copies of the tracrRNA-like encoding region were found 5 prime of the dispersed CRISPR (dCRISPR) arrays (FIG. 5). Taken together, the CRISPR-Cas locus architecture surrounding the Lapis cas gene identified herein indicates that it is a new previously undefined type of CRISPR-Cas system.

[0240] The genomic DNA sequence and length of the Lapis cas gene ORF and cas gene translation (not including the stop codon) are referenced in Table 2. Table 3 lists the consensus sequence of the CRISPR array repeats and the sequence of the putative tracrRNA encoding regions (as DNA sequence on the same strand as the cas gene ORF).

TABLE 2
Sequence and length of the Cas gene ORF and Cas gene translation
from Lactobacillus apis CRISPR-Cas system identified herein.

| | | Translation of Cas | |
|---|---|---|---|
| Cas Gene | | Gene ORF (not | |
| ORF | | including the | Length of Cas Gene |
| (SEQ ID | Length of Cas | stop codon) | Translation (No. of |
| NO) | Gene ORF (bp) | (SEQ ID NO) | Amino Acids) |
| 97 | 4173 | 1 | 1391 |

TABLE 3
CRISPR repeat consensus and putative tracrRNA encoding regions
from the Lactobacillus apis CRISPR-Cas system identified herein.

| CRISPR repeat | Putative tracrRNA |
|---|---|
| consensus | sequences |
| (SEQ ID NO) | (SEQ ID NO) |
| 98 | 99-109 |

[0241] Rapid in vitro methods to characterize the protospacer adjacent motif (PAM) requirement of Cas proteins have been described (see PCT/US16/32073 filed May 12, 2016, PCT/US16/32028 filed May 12, 2016, incorporated in their entirety herein by reference) and can be used to characterize the PAM preference of the novel CRISPR-Cas systems described herein. Once a guide RNA or guide RNAs that supports cleavage has been established, the PAM specificity of each Cas endonuclease can be assayed (as described in Examples 7, 14 and 15 U.S. patent application 62/162,377 filed May 15, 2015). After PAM preferences have been determined, the sgRNAs may be further refined for maximal activity or cellular transcription by either increasing or decreasing the tracrRNA 3′ end tail length, increasing or decreasing crRNA repeat and tracrRNA anti-repeat length, modifying the 4 nt self-folding loop or altering the sequence composition.

[0242] Following characterization of the guide RNA and PAM sequence, the Cas endonuclease and guide polynucleotide(s) may be optimized for maximal expression and nuclear localization in eukaryotic cells (as described in Example 12 of PCT/US16/32073, published May 12, 2016) or delivered directly as Cas protein guide polynucleotide complexes (as described in U.S. patent application 62/243,719, filed Oct. 20, 2015 and 62/309,033, filed Mar. 16, 2016) to cleave, nick or bind desired target sites.

### Example 2

### Lactobacillus apis CRISPR-Cas System Utilizes Single Naturally Occurring RNAs to Direct Target Recognition

[0243] A guide RNA or guide RNAs capable of directing Lactobacillus apis (Lapis) target recognition were first determined by computational inspection of the regions encoding the putative trans-activating CRISPR RNAs (tracrRNAs) (SEQ ID NOs: 99-109) in the Lapis CRISPR-Cas locus (FIG. 5). Interestingly, when the putative tracrRNA regions (SEQ ID NOs: 99-109) were simulated to be transcribed in the anti-sense direction relative to the Lapis cas gene (SEQ ID NOs: 110-120) and examined with an RNA folding algorithm (UNAfold (Markham and Zuker (2008) Methods Mol Biol. 453:3-31)), they exhibited an unusual secondary structure near the 5 prime end of their sequence (FIGS. 6-16). Curiously, these structures were reminiscent of that observed for an engineered single guide RNA (sgRNA), a non-natural chimeric fusion of a CRISPR RNA (crRNA) and tracrRNA (Jinek et al. (2012) and Briner et al. (2014) Mol. Cell. 56:333-339). This included a CRISPR repeat-like sequence, a loop sequence that promoted self-folding, an anti-repeat-like sequence with partial complementation to the repeat sequence, and a 3 prime region with tracrRNA hairpin-like secondary structures (FIGS. 6-16).

[0244] To test if these structures were capable of guiding the Lapis Cas protein to recognize a DNA target, the Lapis tracrRNA-like sequences (SEQ ID NOs: 114, 117, and 118) were synthesized as DNA sequences (Integrated DNA Technologies) with a suitable T7 polymerase initiation sequence and a 20 bp sequence, T1, CGCTAAAGAGGAAGAGGACA (SEQ ID NO: 121), for targeting a randomized PAM library as described previously (see PCT/US16/32073 filed May 12, 2016, PCT/US16/32028 filed May 12, 2016, incorporated in their entirety herein by reference (see Example 1)), being appended to the 5 prime end resulting in SEQ ID NOs: 122-124. The synthesized fragments were then PCR amplified adding on a promoter capable of directing T7 polymerase transcription and used as template for the production of guide RNAs containing the T1 spacer utilizing TranscriptAid T7 High Yield Transcription Kit (Thermo Fisher Scientific). Next, the resulting guide RNAs (SEQ ID NOs: 125-127) were complexed with Lapis Cas protein produced by in vitro translation and examined for their ability to support cleavage against a plasmid DNA 7 bp randomized PAM library as described previously (see PCT/US16/32073 filed May 12, 2016, PCT/US16/32028 filed May 12, 2016, incorporated in their entirety herein by reference (see Example 15)). Surprisingly, cleavage activity was detected with all 3 naturally occurring single guide RNAs and protospacer adjacent motif (PAM) sequences permitting cleavage recovered (Table 4) as described previously (see PCT/US16/32073 filed May 12, 2016, PCT/US16/32028 filed May 12, 2016, incorporated in their entirety herein by reference (see Examples 8 and 14)).

[0245] Taken together, this indicated that the putative tracrRNAs encoded in the Lactobacillus apis (Lapis) CRISPR-Cas locus, described herein (SEQ ID NOs: 110-120), with the addition of a 5 prime sequence containing homology to a target sequence that is adjacent to an appropriate PAM sequence, function as single naturally occurring CRISPR RNAs (snocrRNAs) engineered to direct Lapis Cas DNA target recognition Thus, presenting a novel in cis mechanism for the production of RNA species capable of directing Cas endonuclease target recognition that is different than the trans-encoding CRISPR RNA (tracrRNA) approach employed by Type II CRISPR-Cas systems (Deltcheva et al. (2011) Nature. 471:602-607, Makarova et al. (2011) Nature Reviews. 9:467-477, Chylinski et al. (2014) Nucleic Acids Research. 42:6091-6105, and Briner et al. (2014)).

[0246] Chimeric engineered guide RNAs capable of forming a guide RNA/Cas complex and directing the Lapis Cas protein to a DNA target sequence may be produced by adding a nucleotide sequence with homology to a DNA target sequence (also referred to as a variable targeting domain) 5 prime to the putative tracrRNAs described herein. Examples of such guide RNAs are listed in SEQ ID NOs: 128-138 where N may be any nucleotide.

TABLE 4
Position frequency matrix (PFM) and PAM consensus for Lactobacillus apis Cas protein.

| | 1 | 2 | 3 | 4 | 5 | 6 | 7 |
|---|---|---|---|---|---|---|---|
| G | 14.96% | 5.46% | 14.94% | 21.29%* | 6.11% | 11.39% | 16.57% |
| C | 54.87%* | 39.83%* | 14.85% | 35.61% | 42.81%* | 32.17% | 32.42% |
| A | 8.20% | 34.06%* | 69.34%* | 22.29% | 29.32%* | 43.04%* | 27.24%* |
| T | 21.97% | 20.65%* | 0.87% | 20.81% | 21.76%* | 13.40% | 23.76%* |
| Consensus | C | H | A | N | H | N | N |

[0247] Next, it was observed that the snocrRNAs while present individually were also associated with each CRISPR array (FIG. 5). Close examination of the repeat-spacer-repeat structure typical of a CRISPR array (Bhaya et al. (2011) and Wiedenheft et al. (2012)) revealed that the 5 prime end of the snocrRNAs (when transcribed in an anti-sense direction relative to the Lapis cas gene) formed the 5 prime most CRISPR repeat boundary of each array (FIG. 5, labels f, g, h, i, j, and k). This direct association with the CRISPR array suggests that the tracrRNA-like structures present in the snocrRNA are directly transcribed in cis with each CRISPR array (in an anti-sense orientation to the Lapis cas gene). Taken together, this further distinguishes the CRISPR-Cas system of Lactobacillus apis (Lapis) from Type II CRISPR-Cas sytems as it provides an in cis mechanism as opposed to a trans-encoded and activation model typified by the Type II CRISPR-Cas system (Deltcheva et al. (2011) Nature. 471:602-607, Makarova et al. (2011) Nature Reviews. 9:467-477, Chylinski et al. (2014) Nucleic Acids Research. 42:6091-6105, and Briner et al. (2014) Mol. Cell. 56:333-339).

### Example 3

### Transformation of Maize Immature Embryos

[0248] Transformation can be accomplished by various methods known to be effective in plants, including particle-mediated delivery, Agrobacterium-mediated transformation, PEG-mediated delivery, and electroporation.

[0249] a. Particle-Mediated Delivery

[0250] Transformation of maize immature embryos using particle delivery is performed as follows. Media recipes follow below.

[0251] The ears are husked and surface sterilized in 30% Clorox bleach plus 0.5% Micro detergent for 20 minutes, and rinsed two times with sterile water. The immature embryos are isolated and placed embryo axis side down (scutellum side up), 25 embryos per plate, on 560Y medium for 4 hours and then aligned within the 2.5-cm target zone in preparation for bombardment. Alternatively, isolated embryos are placed on 560L (Initiation medium) and placed in the dark at temperatures ranging from 26° C. to 37° C. for 8 to 24 hours prior to placing on 560Y for 4 hours at 26° C. prior to bombardment as described above.

[0252] Plasmids containing the double strand brake inducing agent and donor DNA are constructed using standard molecular biology techniques and co-bombarded with plasmids containing the developmental genes ODP2 (AP2 domain transcription factor ODP2 (Ovule development protein 2); US20090328252 A1) and Wushel (US2011/0167516).

[0253] The plasmids and DNA of interest are precipitated onto 0.6 μm (average diameter) gold pellets using a water-soluble cationic lipid transfection reagent as follows. DNA solution is prepared on ice using 1 μg of plasmid DNA and optionally other constructs for co-bombardment such as 50 ng (0.5 μl) of each plasmid containing the developmental genes ODP2 (AP2 domain transcription factor ODP2 (Ovule development protein 2); US20090328252 A1) and Wushel. To the pre-mixed DNA, 20 μl of prepared gold particles (15 mg/ml) and 5 μl of a water-soluble cationic lipid transfection reagent is added in water and mixed carefully. Gold particles are pelleted in a microfuge at 10,000 rpm for 1 min and supernatant is removed. The resulting pellet is carefully rinsed with 100 ml of 100% EtOH without resuspending the pellet and the EtOH rinse is carefully removed. 105 μl of 100% EtOH is added and the particles are resuspended by brief sonication. Then, 10 μl is spotted onto the center of each macrocarrier and allowed to dry about 2 minutes before bombardment.

[0254] Alternatively, the plasmids and DNA of interest are precipitated onto 1.1 μm (average diameter) tungsten pellets using a calcium chloride (CaCl₂)) precipitation procedure by mixing 100 μl prepared tungsten particles in water, 10 μl (1 μg) DNA in Tris EDTA buffer (1 μg total DNA), 100 μl 2.5 M CaC12, and 10 μl 0.1 M spermidine. Each reagent is added sequentially to the tungsten particle suspension, with mixing. The final mixture is sonicated briefly and allowed to incubate under constant vortexing for 10 minutes. After the precipitation period, the tubes are centrifuged briefly, liquid is removed, and the particles are washed with 500 ml 100% ethanol, followed by a 30 second centrifugation. Again, the liquid is removed, and 105 μl of 100% ethanol is added to the final tungsten particle pellet. For particle gun bombardment, the tungsten/DNA particles are briefly sonicated. 10 μl of the tungsten/DNA particles is spotted onto the center of each macrocarrier, after which the spotted particles are allowed to dry about 2 minutes before bombardment.

[0255] The sample plates are bombarded at level #4 with a Biorad Helium Gun. All samples receive a single shot at 450 PSI, with a total of ten aliquots taken from each tube of prepared particles/DNA.

[0256] Following bombardment, the embryos are incubated on 560P (maintenance medium) for 12 to 48 hours at temperatures ranging from 26 C to 37 C, and then placed at 26 C. After 5 to 7 days the embryos are transferred to 560R selection medium containing 3 mg/liter Bialaphos, and subcultured every 2 weeks at 26 C. After approximately 10 weeks of selection, selection-resistant callus clones are transferred to 288J medium to initiate plant regeneration. Following somatic embryo maturation (2-4 weeks), well-developed somatic embryos are transferred to medium for germination and transferred to a lighted culture room. Approximately 7-10 days later, developing plantlets are transferred to 272V hormone-free medium in tubes for 7-10 days until plantlets are well established. Plants are then transferred to inserts in flats (equivalent to a 2.5″ pot) containing potting soil and grown for 1 week in a growth chamber, subsequently grown an additional 1-2 weeks in the greenhouse, then transferred to Classic 600 pots (1.6 gallon) and grown to maturity. Plants are monitored and scored for transformation efficiency, and/or modification of regenerative capabilities.

[0257] Initiation medium (560L) comprises 4.0 g/l N6 basal salts (SIGMA C-1416), 1.0 ml/l Eriksson's Vitamin Mix (1000× SIGMA-1511), 0.5 mg/l thiamine HCl, 20.0 g/l sucrose, 1.0 mg/l 2,4-D, and 2.88 g/l L-proline (brought to volume with D-I H2O following adjustment to pH 5.8 with KOH); 2.0 g/l Gelrite (added after bringing to volume with D-I H2O); and 8.5 mg/l silver nitrate (added after sterilizing the medium and cooling to room temperature).

[0258] Maintenance medium (560P) comprises 4.0 g/l N6 basal salts (SIGMA C-1416), 1.0 ml/l Eriksson's Vitamin Mix (1000× SIGMA-1511), 0.5 mg/l thiamine HCl, 30.0 g/l sucrose, 2.0 mg/l 2,4-D, and 0.69 g/l L-proline (brought to volume with D-I H₂O following adjustment to pH 5.8 with KOH); 3.0 g/l Gelrite (added after bringing to volume with D-I H2O); and 0.85 mg/l silver nitrate (added after sterilizing the medium and cooling to room temperature).

[0259] Bombardment medium (560Y) comprises 4.0 g/l N6 basal salts (SIGMA C-1416), 1.0 ml/l Eriksson's Vitamin Mix (1000× SIGMA-1511), 0.5 mg/l thiamine HCl, 120.0 g/l sucrose, 1.0 mg/l 2,4-D, and 2.88 g/l L-proline (brought to volume with D-I H2O following adjustment to pH 5.8 with KOH); 2.0 g/l Gelrite (added after bringing to volume with D-I H2O); and 8.5 mg/l silver nitrate (added after sterilizing the medium and cooling to room temperature).

Selection medium (560R) comprises 4.0 g/l N6 basal salts (SIGMA C-1416), 1.0 ml/l Eriksson's Vitamin Mix (1000× SIGMA-1511), 0.5 mg/l thiamine HCl, 30.0 g/l sucrose, and 2.0 mg/l 2,4-D (brought to volume with D-I H2O following adjustment to pH 5.8 with KOH); 3.0 g/l Gelrite (added after bringing to volume with D-I H2O); and 0.85 mg/l silver nitrate and 3.0 mg/l bialaphos (both added after sterilizing the medium and cooling to room temperature).

[0260] Plant regeneration medium (288J) comprises 4.3 g/l MS salts (GIBCO 11117-074), 5.0 ml/l MS vitamins stock solution (0.100 g nicotinic acid, 0.02 g/l thiamine HCL, 0.10 g/l pyridoxine HCL, and 0.40 g/l glycine brought to volume with polished D-I H2O) (Murashige and Skoog (1962) Physiol. Plant. 15:473), 100 mg/l myo-inositol, 0.5 mg/l zeatin, 60 g/l sucrose, and 1.0 ml/l of 0.1 mM abscisic acid (brought to volume with polished D-I H2O after adjusting to pH 5.6); 3.0 g/l Gelrite (added after bringing to volume with D-I H2O); and 1.0 mg/l indoleacetic acid and 3.0 mg/l bialaphos (added after sterilizing the medium and cooling to 60° C.). Hormone-free medium (272V) comprises 4.3 g/l MS salts (GIBCO 11117-074), 5.0 ml/l MS vitamins stock solution (0.100 g/l nicotinic acid, 0.02 g/l thiamine HCL, 0.10 g/l pyridoxine HCL, and 0.40 g/l glycine brought to volume with polished D-I H2O), 0.1 g/l myo-inositol, and 40.0 g/l sucrose (brought to volume with polished D-I H2O after adjusting pH to 5.6); and 6 g/l bacto-agar (added after bringing to volume with polished D-I H2O), sterilized and cooled to 60° C.

[0261] b. Agrobacterium-Mediated Transformation

[0262] Agrobacterium-mediated transformation was performed essentially as described in Djukanovic et al. (2006) Plant Biotech J 4:345-57. Briefly, 10-12 day old immature embryos (0.8-2.5 mm in size) were dissected from sterilized kernels and placed into liquid medium (4.0 g/L N6 Basal Salts (Sigma C-1416), 1.0 ml/L Eriksson's Vitamin Mix (Sigma E-1511), 1.0 mg/L thiamine HCl, 1.5 mg/L 2, 4-D, 0.690 g/L L-proline, 68.5 g/L sucrose, 36.0 g/L glucose, pH 5.2). After embryo collection, the medium was replaced with 1 ml Agrobacterium at a concentration of 0.35-0.45 OD550. Maize embryos were incubated with Agrobacterium for 5 min at room temperature, then the mixture was poured onto a media plate containing 4.0 g/L N6 Basal Salts (Sigma C-1416), 1.0 ml/L Eriksson's Vitamin Mix (Sigma E-1511), 1.0 mg/L thiamine HCl, 1.5 mg/L 2, 4-D, 0.690 g/L L-proline, 30.0 g/L sucrose, 0.85 mg/L silver nitrate, 0.1 nM acetosyringone, and 3.0 g/L Gelrite, pH 5.8. Embryos were incubated axis down, in the dark for 3 days at 20° C., then incubated 4 days in the dark at 28° C., then transferred onto new media plates containing 4.0 g/L N6 Basal Salts (Sigma C-1416), 1.0 ml/L Eriksson's Vitamin Mix (Sigma E-1511), 1.0 mg/L thiamine HCl, 1.5 mg/L 2, 4-D, 0.69 g/L L-proline, 30.0 g/L sucrose, 0.5 g/L MES buffer, 0.85 mg/L silver nitrate, 3.0 mg/L Bialaphos, 100 mg/L carbenicillin, and 6.0 g/L agar, pH 5.8. Embryos were subcultured every three weeks until transgenic events were identified. Somatic embryogenesis was induced by transferring a small amount of tissue onto regeneration medium (4.3 g/L MS salts (Gibco 11117), 5.0 ml/L MS Vitamins Stock Solution, 100 mg/L myo-inositol, 0.1 μM ABA, 1 mg/L IAA, 0.5 mg/L zeatin, 60.0 g/L sucrose, 1.5 mg/L Bialaphos, 100 mg/L carbenicillin, 3.0 g/L Gelrite, pH 5.6) and incubation in the dark for two weeks at 28° C. All material with visible shoots and roots were transferred onto media containing 4.3 g/L MS salts (Gibco 11117), 5.0 ml/L MS Vitamins Stock Solution, 100 mg/L myo-inositol, 40.0 g/L sucrose, 1.5 g/L Gelrite, pH 5.6, and incubated under artificial light at 28° C. One week later, plantlets were moved into glass tubes containing the same medium and grown until they were sampled and/or transplanted into soil.

### Example 4

### Transient Expression of BBM Enhances Transformation

[0263] Parameters of the transformation protocol can be modified to ensure that the BBM activity is transient. One such method involves precipitating the BBM-containing plasmid in a manner that allows for transcription and expression, but precludes subsequent release of the DNA, for example, by using the chemical PEI. In one example, the BBM plasmid is precipitated onto gold particles with PEI, while the transgenic expression cassette (UBI::moPAT˜GFPm::PinII; moPAT is the maize optimized PAT gene) to be integrated is precipitated onto gold particles using the standard calcium chloride method.

[0264] Briefly, gold particles were coated with PEI as follows. First, the gold particles were washed. Thirty-five mg of gold particles, 1.0 in average diameter (A.S.I. #162-0010), were weighed out in a microcentrifuge tube, and 1.2 ml absolute EtOH was added and vortexed for one minute. The tube was incubated for 15 minutes at room temperature and then centrifuged at high speed using a microfuge for 15 minutes at 4° C. The supernatant was discarded and a fresh 1.2 ml aliquot of ethanol (EtOH) was added, vortexed for one minute, centrifuged for one minute, and the supernatant again discarded (this is repeated twice). A fresh 1.2 ml aliquot of EtOH was added, and this suspension (gold particles in EtOH) was stored at −20° C. for weeks. To coat particles with polyethylimine (PEI; Sigma #P3143), 250 μl of the washed gold particle/EtOH mix was centrifuged and the EtOH discarded. The particles were washed once in 100 μl ddH2O to remove residual ethanol, 250 μl of 0.25 mM PEI was added, followed by a pulse-sonication to suspend the particles and then the tube was plunged into a dry ice/EtOH bath to flash-freeze the suspension, which was then lyophilized overnight. At this point, dry, coated particles could be stored at −80° C. for at least 3 weeks. Before use, the particles were rinsed 3 times with 250 μl aliquots of 2.5 mM HEPES buffer, pH 7.1, with 1× pulse-sonication, and then a quick vortex before each centrifugation. The particles were then suspended in a final volume of 250 μl HEPES buffer. A 25 μl aliquot of the particles was added to fresh tubes before attaching DNA. To attach uncoated DNA, the particles were pulse-sonicated, then 1 μg of DNA (in 5 μl water) was added, followed by mixing by pipetting up and down a few times with a Pipetteman and incubated for 10 minutes. The particles were spun briefly (i.e. 10 seconds), the supernatant removed, and 60 μl EtOH added. The particles with PEI-precipitated DNA-1 were washed twice in 60 μl of EtOH. The particles were centrifuged, the supernatant discarded, and the particles were resuspended in 45 μl water. To attach the second DNA (DNA-2), precipitation using a water-soluble cationic lipid transfection reagent was used. The 45 μl of particles/DNA-1 suspension was briefly sonicated, and then 5 μl of 100 ng/μl of DNA-2 and 2.5 μl of the water-soluble cationic lipid transfection reagent were added. The solution was placed on a rotary shaker for 10 minutes, centrifuged at 10,000 g for 1 minute. The supernatant was removed, and the particles resuspended in 60 μl of EtOH. The solution was spotted onto macrocarriers and the gold particles onto which DNA-1 and DNA-2 had been sequentially attached were delivered into scutellar cells of 10 DAP Hi-II immature embryos using a standard protocol for the PDS-1000. For this experiment, the DNA-1 plasmid contained a UBI::RFP::pinII expression cassette, and DNA-2 contained a UBI::CFP::pinII expression cassette. Two days after bombardment, transient expression of both the CFP and RFP fluorescent markers was observed as numerous red & blue cells on the surface of the immature embryo. The embryos were then placed on non-selective culture medium and allowed to grow for 3 weeks before scoring for stable colonies. After this 3-week period, 10 multicellular, stably-expressing blue colonies were observed, in comparison to only one red colony. This demonstrated that PEI-precipitation could be used to effectively introduce DNA for transient expression while dramatically reducing integration of the PEI-introduced DNA and thus reducing the recovery of RFP-expressing transgenic events. In this manner, PEI-precipitation can be used to deliver transient expression of BBM and/or WUS2.

[0265] For example, the particles are first coated with UBI::BBM::pinII using PEI, then coated with UBI::moPAT-YFP using a water-soluble cationic lipid transfection reagent, and then bombarded into scutellar cells on the surface of immature embryos. PEI-mediated precipitation results in a high frequency of transiently expressing cells on the surface of the immature embryo and extremely low frequencies of recovery of stable transformants Thus, it is expected that the PEI-precipitated BBM cassette expresses transiently and stimulates a burst of embryogenic growth on the bombarded surface of the tissue (i.e. the scutellar surface), but this plasmid will not integrate. The PAT-GFP plasmid released from the Ca++/gold particles is expected to integrate and express the selectable marker at a frequency that results in substantially improved recovery of transgenic events. As a control treatment, PEI-precipitated particles containing a UBI::GUS::pinII (instead of BBM) are mixed with the PAT-GFP/Ca++ particles. Immature embryos from both treatments are moved onto culture medium containing 3 mg/l bialaphos. After 6-8 weeks, it is expected that GFP+, bialaphos-resistant calli will be observed in the PEI/BBM treatment at a much higher frequency relative to the control treatment (PEI/GUS).

[0266] As an alternative method, the BBM plasmid is precipitated onto gold particles with PEI, and then introduced into scutellar cells on the surface of immature embryos, and subsequent transient expression of the BBM gene elicits a rapid proliferation of embryogenic growth. During this period of induced growth, the explants are treated with Agrobacterium using standard methods for maize (see Example 1), with T-DNA delivery into the cell introducing a transgenic expression cassette such as UBI::moPAT˜GFPm::pinII. After co-cultivation, explants are allowed to recover on normal culture medium, and then are moved onto culture medium containing 3 mg/l bialaphos. After 6-8 weeks, it is expected that GFP+, bialaphos-resistant calli will be observed in the PEI/BBM treatment at a much higher frequency relative to the control treatment (PEI/GUS).

[0267] It may be desirable to “kick start” callus growth by transiently expressing the BBM and/or WUS2 polynucleotide products. This can be done by delivering BBM and WUS2 5′-capped polyadenylated RNA, expression cassettes containing BBM and WUS2 DNA, or BBM and/or WUS2 proteins. All of these molecules can be delivered using a biolistics particle gun. For example 5′-capped polyadenylated BBM and/or WUS2 RNA can easily be made in vitro using Ambion's mMessage mMachine kit. RNA is co-delivered along with DNA containing a polynucleotide of interest and a marker used for selection/screening such as Ubi::moPAT˜GFPm::PinII. It is expected that the cells receiving the RNA will immediately begin dividing more rapidly and a large portion of these will have integrated the agronomic gene. These events can further be validated as being transgenic clonal colonies because they will also express the PAT-GFP fusion protein (and thus will display green fluorescence under appropriate illumination). Plants regenerated from these embryos can then be screened for the presence of the polynucleotide of interest.

1. A guide RNA/Cas endonuclease complex comprising at least one guide RNA and a Cas endonuclease, wherein said Cas endonuclease comprises a first nuclease domain of SEQ ID NO: 88, or a functional fragment or functional variant of SEQ ID NO:88, and a second nuclease domain comprising at least one nuclease subdomain selected from the group consisting of SEQ ID NO: 90, SEQ ID NO: 92 and SEQ ID NO: 94, or a functional fragment or functional variant of said second nuclease domain, wherein said guide RNA is a chimeric engineered guide RNA, wherein said guide RNA/Cas endonuclease complex is capable of recognizing, binding to, and optionally nicking, cleaving, or covalently attaching to all or part of a target sequence.

2. The guide RNA/Cas endonuclease complex of claim 1, wherein said Cas endonuclease has at least 80% sequence identity to SEQ ID NO: 1 and wherein said Cas endonuclease is not a Type II Cas9 endonuclease.

3. The guide RNA/Cas endonuclease complex of claim 1 or claim 2, comprising at least one chimeric engineered guide RNA comprising a variable targeting domain that can recognize a target DNA in a eukaryotic cell.

4. The guide RNA/Cas endonuclease complex of claim 1 or claim 2, wherein said target sequence is located in the genome of a prokaryotic or eukaryotic cell.

5. A method for modifying a target site in the genome of a cell, the method comprising introducing into said cell at least one chimeric engineered guide RNA, and a Cas endonuclease comprising a first nuclease domain of SEQ ID NO: 88, and a second nuclease domain comprising at least one nuclease sub-domain selected from the group consisting of SEQ ID NO: 90, SEQ ID NO: 92 and SEQ ID NO: 94, wherein said chimeric engineered guide RNA and Cas endonuclease can form a complex that is capable of recognizing, binding to, and optionally nicking, cleaving, or covalently attaching to all or part of said target site; further comprising identifying at least one cell that has a modification at said target, wherein the modification at said target site is selected from the group consisting of (i) a replacement of at least one nucleotide, (ii) a deletion of at least one nucleotide, (iii) an insertion of at least one nucleotide, and (iv) any combination of (i)-(iii).

6. (canceled)

7. A method for editing a nucleotide sequence in the genome of a cell, the method comprising introducing into said cell at least one polynucleotide modification template, at least one chimeric engineered guide RNA, and a Cas endonuclease comprising a first nuclease domain of SEQ ID NO: 88, and a second nuclease domain comprising at least one nuclease sub-domain selected from the group consisting of SEQ ID NO: 90, SEQ ID NO: 92 and SEQ ID NO: 94, wherein said polynucleotide modification template comprises at least one nucleotide modification of said nucleotide sequence, wherein said chimeric engineered guide RNA and Cas endonuclease can form a complex that is capable of recognizing, binding to, and optionally nicking, cleaving, or covalently attaching to all or part of said target site.

8. A method for modifying a target site in the genome of a cell, the method comprising providing to said cell at least one chimeric engineered guide RNA, at least one donor DNA, and a Cas endonuclease comprising a first nuclease domain of SEQ ID NO: 88, and a second nuclease domain comprising at least one nuclease sub-domain selected from the group consisting of SEQ ID NO: 90, SEQ ID NO: 92 and SEQ ID NO: 94, wherein said at least one chimeric engineered guide RNA and Cas endonuclease can form a complex that is capable of recognizing, binding to, and optionally nicking, cleaving, or covalently attaching to all or part of said target site, wherein said donor DNA comprises a polynucleotide of interest; further comprising identifying at least one cell that said polynucleotide of interest integrated in or near said target site.

9. (canceled)

10. (canceled)

11. The method of any one of claims 5, 7, or 8, wherein the cell is selected from the group consisting of a mammalian, human cell, non-human cell, animal cell, bacterial cell, fungal cell, insect cell, yeast cell, non-conventional yeast cell, and a plant cell.

12. (canceled)

13. The method of claim 11 wherein the plant cell is selected from the group consisting of maize, rice, sorghum, rye, barley, wheat, millet, oats, sugarcane, turfgrass, switchgrass, soybean, canola, alfalfa, sunflower, cotton, tobacco, peanut, potato, Arabidopsis, and safflower cell.

14. (canceled)

15. (canceled)

16. (canceled)

17. A recombinant DNA polynucleotide comprising a promoter operably linked to a plant-optimized polynucleotide encoding a Cas endonuclease, wherein said Cas endonuclease comprises a first nuclease domain of SEQ ID NO: 88, and a second nuclease domain comprising at least one nuclease sub-domain selected from the group consisting of SEQ ID NO: 90, SEQ ID NO: 92 and SEQ ID NO: 94.

18. A kit for binding, cleaving or nicking a target sequence in a prokaryotic or eukaryotic cell or organism, said kit comprising a guide polynucleotide specific for said target sequence, and a Cas endonuclease or a polynucleotide encoding said Cas endonuclease, wherein said Cas endonuclease comprises a first nuclease domain of SEQ ID NO: 88, and a second nuclease domain comprising at least one nuclease sub-domain selected from the group consisting of SEQ ID NO: 90, SEQ ID NO: 92 and SEQ ID NO: 94, wherein said guide polynucleotide is capable of forming a guide polynucleotide/Cas endonuclease complex, wherein said complex can recognize, bind to, and optionally nick or cleave said target sequence.

19. A chimeric engineered guide RNA capable of forming a guide RNA/Cas endonuclease complex that can recognize, bind to, and optionally nick or cleave a target sequence, wherein said guide RNA is selected from the group consisting of SEQ ID NOs: 128-138.

The application's sequence listing, which the Patent Office published only in electronic form, follows.

SEQUENCE LISTING (138 sequences)

SEQ ID NO: 1 - protein, 1391 aa, Lactobacillus apis
MMKKNNDYIVGLSLEPDAVGFAAIDKKNKLISLKGKNVIGVTTFQEGQTAEERRTSRSARRLNHRKKRRIKFLEEIFAEEIAKVDPGFFVRQHNSWVSPLDKERTANPAIIFPTKSEEKDFYKAYPTVYHLRQALMTENKKFDLREIYIAMHSIIKRRGNFLYSVSAQSFDTSKINVRGALETINDNYQAFKSQGLTCCELAVENAEKIEDVIKGVDEDKTIFTREKIKKTAKLLATDKPDKAAQKMYKQLATAIFGFKAQFDVILGESIDKAEKPNWSLKLSDEDYEDKLEAISGSLNDEQQAIVKEIQSLYTSIVLNSIVPDGQTISESMIQTYNQHKRDLILLRKATADQEDPKKAEKLKLAYDLYINNRSHGKVLAAKKAFNKNKKLTTEEFYKQVKSNLPENSDNSAEILTLIENNEFLPVLRSRKNTSIPYQLQQKELDLIIKNQSKYYPFLAEENPVKEHRKQAPYKLDELIRFKIPYYVGPLITEADQKSTTGKDFSWLVRSTPNDHAQITPWNFNEKVDIAATANKFIRKMTVKDTYILGEDVLPAKSLIYQRFEVLNELNGLKVNDKKLSVETKQDIYKDLFQSKITVNESDLVDYLHQQKGYSKVEIAGLTPVGKTFRFNSSLSSYIHFRKLGLFDKQLDDAKYQKDFEKIIEWASIFNDKKIYQQKLREITWLSEKQFKSIANWTLNGWGRLSKRLLTELYDENGQNIIERLWDSKQNFQQIITSAGFKKEIDIANEDMAKSTDLEDILAEAYTTPSNKKTVRKASKIVKEIVSCAGHNAPSQIVLSKPIINQNPYDLSRNRGKELLKKYEQATSSLINKELVKELEDCNANRLLSSDKYYLYFSQAGRDALTGEKIPYSEVKSCVVRNVLPKKFSQSRDISNKILVIKSDNNAKIELTKECSSRIIPDIDITVGHMWSEWQADELINKAKLDNLYVDPDNLQDFEQNKYLGKELSVKSAIVKLLAVVLHKLYPKTEIILINSQYPKALRERLDLYRNTQVNDYYNGMDAYLNAVCGNFLYQVYPKFRSYMVYGQYDIFNGKGSLKNLKQFNLVWPLLQKNDAKQKNAGKIYESGTDKVLFDRQNDFYAPLIRAYNFKIMLFSQETYTEDEAMTKATIYPRADRDKAGTRTSLVPKKKGLDPEIYGGFSNSKNSFMVIVKIKTAKEDTYKAIPIAMRYRDTLEKAKKNKTYDETLRSIVEPVVATTRGYRGFDIIVNHLNFNQEMVNQTYGNFILSKATYMYNGNQIVLSPDAMRILTGKLEEKEDEDSSLVKVYDEILEQVDKYLPLFNMRSYNQKLHDARKVFEKLDVRKKRSTLSSILRGLHCNSSSSDIKELGIGTGFGFFQKQSGIPLTSDTLIVFKSITGLRRRKVSLSDLEQ

SEQ ID NO: 2 - protein, 1368 aa, Streptococcus pyogenes [sequence omitted]

SEQ ID NO: 3 - protein, 1345 aa, Streptococcus mutans
MKKPYSIGLDIGTNSVGWAVVTDDYKVPAKKMKVLGNTDKSHIEKNLLGALLFDSGNTAEDRRLKRTARRRYTRRRNRILYLQEIFSEEMGKVDDSFFHRLEDSFLVTEDKRGERHPIFGNLEEEVKYHENFPTIYHLRQYLADNPEKVDLRLVYLALAHIIKFRGHFLIEGKFDTRNNDVQRLFQEFLAVYDNTFENSSLQEQNVQVEEILTDKISKSAKKDRVLKLFPNEKSNGRFAEFLKLIVGNQADFKKHFELEEKAPLQFSKDTYEEELEVLLAQIGDNYAELFLSAKKLYDSILLSGILTVTDVGTKAPLSASMIQRYNEHQMDLAQLKQFIRQKLSDKYNEVFSDVSKDGYAGYIDGKTNQEAFYKYLKGLLNKIEGSGYFLDKIEREDFLRKQRTFDNGSIPHQIHLQEMRAIIRRQAEFYPFLADNQDRIEKLLTFRIPYYVGPLARGKSDFAWLSRKSADKITPWNFDEIVDKESSAEAFINRMTNYDLYLPNQKVLPKHSLLYEKFTVYNELTKVKYKTEQGKTAFFDANMKQEIFDGVFKVYRKVTKDKLMDFLEKEFDEFRIVDLTGLDKENKVFNASYGTYHDLCKILDKDFLDNSKNEKILEDIVLTLTLFEDREMIRKRLENYSDLLTKEQVKKLERRHYTGWGRLSAELIHGIRNKESRKTILDYLIDDGNSNRNFMQLINDDALSFKEEIAKAQVIGETDNLNQVVSDIAGSPAIKKGILQSLKIVDELVKIMGHQPENIVVEMARENQFTNQGRRNSQQRLKGLTDSIKEFGSQILKEHPVENSQLQNDRLFLYYLQNGRDMYTGEELDIDYLSQYDIDHIIPQAFIKDNSIDNRVLTSSKENRGKSDDVPSKDVVRKMKSYWSKLLSAKLITQRKFDNLTKAERGGLTDDDKAGFIKRQLVETRQITKHVARILDERFNTETDENNKKIRQVKIVTLKSNLVSNFRKEFELYKVREINDYHHAHDAYLNAVIGKALLGVYPQLEPEFVYGDYPHFHGHKENKATAKKFFYSNIMNFFKKDDVRTDKNGEIIWKKDEHISNIKKVLSYPQVNIVKKVEEQTGGFSKESILPKGNSDKLIPRKTKKFYWDTKKYGGFDSPIVAYSILVIADIEKGKSKKLKTVKALVGVTIMEKMTFERDPVAFLERKGYRNVQEENIIKLPKYSLFKLENGRKRLLASARELQKGNEIVLPNHLGTLLYHAKNIHKVDEPKHLDYVDKHKDEFKELLDVVSNFSKKYTLAEGNLEKIKELYAQNNGEDLKELASSFINLLTFTAIGAPATFKFFDKNIDRKRYTSTTEILNATLIHQSITGLYETRIDLNKLGGD

SEQ ID NO: 4 - protein, 1388 aa, Streptococcus thermophilus
MTKPYSIGLDIGTNSVGWAVTTDNYKVPSKKMKVLGNTSKKYIKKNLLGVLLFDSGITAEGRRLKRTARRRYTRRRNRILYLQEIFSTEMATLDDAFFQRLDDSFLVPDDKRDSKYPIFGNLVEEKAYHDEFPTIYHLRKYLADSTKKADLRLVYLALAHMIKYRGHFLIEGEFNSKNNDIQKNFQDFLDTYNAIFESDLSLENSKQLEEIVKDKISKLEKKDRILKLFPGEKNSGIFSEFLKLIVGNQADFRKCFNLDEKASLHFSKESYDEDLETLLGYIGDDYSDVFLKAKKLYDAILLSGFLTVTDNETEAPLSSAMIKRYNEHKEDLALLKEYIRNISLKTYNEVFKDDTKNGYAGYIDGKTNQEDFYVYLKKLLAEFEGADYFLEKIDREDFLRKQRTFDNGSIPYQIHLQEMRAILDKQAKFYPFLAKNKERIEKILTFRIPYYVGPLARGNSDFAWSIRKRNEKITPWNFEDVIDKESSAEAFINRMTSFDLYLPEEKVLPKHSLLYETFNVYNELTKVRFIAESMRDYQFLDSKQKKDIVRLYFKDKRKVTDKDIIEYLHAIYGYDGIELKGIEKQFNSSLSTYHDLLNIINDKEFLDDSSNEAIIEEIIHTLTIFEDREMIKQRLSKFENIFDKSVLKKLSRRHYTGWGKLSAKLINGIRDEKSGNTILDYLIDDGISNRNFMQLIHDDALSFKKKIQKAQIIGDEDKGNIKEVVKSLPGSPAIKKGILQSIKIVDELVKVMGGRKPESIVVEMARENQYTNQGKSNSQQRLKRLEKSLKELGSKILKENIPAKLSKIDNNALQNDRLYLYYLQNGKDMYTGDDLDIDRLSNYDIDHIIPQAFLKDNSIDNKVLVSSASNRGKSDDVPSLEVVKKRKTFWYQLLKSKLISQRKFDNLTKAERGGLSPEDKAGFIQRQLVETRQITKHVARLLDEKFNNKKDENNRAVRTVKIITLKSTLVSQFRKDFELYKVREINDFHHAHDAYLNAVVASALLKKYPKLEPEFVYGDYPKYNSFRERKSATEKVYFYSNIMNIFKKSISLADGRVIERPLIEVNEETGESVWNKESDLATVRRVLSYPQVNVVKKVEEQNHGLDRGKPKGLFNANLSSKPKPNSNENLVGAKEYLDPKKYGGYAGISNSFTVLVKGTIEKGAKKKITNVLEFQGISILDRINYRKDKLNFLLEKGYKDIELIIELPKYSLFELSDGSRRMLASILSTNNKRGEIHKGNQIFLSQKFVKLLYHAKRISNTINENHRKYVENHKKEFEELFYYILEFNENYVGAKKNGKLLNSAFQSWQNHSIDELCSSFIGPTGSERKGLFELTSRGSAADFEFLGVKIPRYRDYTPSSLLKDATLIHQSVTGLYETRIDLAKLGEG

SEQ ID NO: 5 - protein, 1121 aa, Streptococcus thermophilus
MSDLVLGLDIGIGSVGVGILNKVTGEIIHKNSRIFPAAQAENNLVRRTNRQGRRLARRKKHRRVRLNRLFEESGLITDFTKISINLNPYQLRVKGLTDELSNEELFIALKNMVKHRGISYLDDASDDGNSSVGDYAQIVKENSKQLETKTPGQIQLERYQTYGQLRGDFTVEKDGKKHRLINVFPTSAYRSEALRILQTQQEFNPQITDEFINRYLEILTGKRKYYHGPGNEKSRTDYGRYRTSGETLDNIFGILIGKCTFYPDEFRAAKASYTAQEFNLLNDLNNLTVPTETKKLSKEQKNQIINYVKNEKAMGPAKLFKYIAKLLSCDVADIKGYRIDKSGKAEIHTFEAYRKMKTLETLDIEQMDRETLDKLAYVLTLNTEREGIQEALEHEFADGSFSQKQVDELVQFRKANSSIFGKGWHNFSVKLMMELIPELYETSEEQMTILTRLGKQKTTSSSNKTKYIDEKLLTEEIYNPVVAKSVRQAIKIVNAAIKEYGDFDNIVIEMARETNEDDEKKAIQKIQKANKDEKDAAMLKAANQYNGKAELPHSVFHGHKQLATKIRLWHQQGERCLYTGKTISIHDLINNSNQFEVDHILPLSITFDDSLANKVLVYATANQEKGQRTPYQALDSMDDAWSFRELKAFVRESKTLSNKKKEYLLTEEDISKFDVRKKFIERNLVDTRYASRVVLNALQEHFRAHKIDTKVSVVRGQFTSQLRRHWGIEKTRDTYHHHAVDALIIAASSQLNLWKKQKNTLVSYSEDQLLDIETGELISDDEYKESVFKAPYQHFVDTLKSKEFEDSILFSYQVDSKFNRKISDATIYATRQAKVGKDKADETYVLGKIKDIYTQDGYDAFMKIYKKDKSKFLMYRHDPQTFEKVIEPILENYPNKQINEKGKEVPCNPFLKYKEEHGYIRKYSKKGNGPEIKSLKYYDSKLGNHIDITPKDSNNKVVLQSVSPWRADVYFNKTTGKYEILGLKYADLQFEKGTGTYKISQEKYNDIKKKEGVDSDSEFKFTLYKNDLLLVKDTETKEQQLFRFLSRTMPKQKHYVELKPYDKQKFEGGEALIKVLGNVANSGQCKKGLGKSNISIYKVRTDVLGNQHIIKNEGDKPKLDF

SEQ ID NO: 6 - protein, 1363 aa, Lactobacillus rhamnosus
MTKLNQPYGIGLDIGSNSIGFAVVDANSHLLRLKGETAIGARLFREGQSAADRRGSRTTRRRLSRTRWRLSFLRDFFAPHITKIDPDFFLRQKYSEISPKDKDRFKYEKRLFNDRTDAEFYEDYPSMYHLRLHLMTHTHKADPREIFLAIHHILKSRGHFLTPGAAKDFNTDKVDLEDIFPALTEAYAQVYPDLELTFDLAKADDFKAKLLDEQATPSDTQKALVNLLLSSDGEKEIVKKRKQVLTEFAKAITGLKTKFNLALGTEVDEADASNWQFSMGQLDDKWSNIETSMTDQGTEIFEQIQELYRARLLNGIVPAGMSLSQAKVADYGQHKEDLELFKTYLKKLNDHELAKTIRGLYDRYINGDDAKPFLREDFVKALTKEVTAHPNEVSEQLLNRMGQANFMLKQRTKANGAIPIQLQQRELDQIIANQSKYYDWLAAPNPVEAHRWKMPYQLDELLNFHIPYYVGPLITPKQQAESGENVFAWMVRKDPSGNITPYNFDEKVDREASANTFIQRMKTTDTYLIGEDVLPKQSLLYQKYEVLNELNNVRINNECLGTDQKQRLIREVFERHSSVTIKQVADNLVAHGDFARRPEIRGLADEKRFLSSLSTYHQLKEILHEAIDDPTKLLDIENIITWSTVFEDHTIFETKLAEIEWLDPKKINELSGIRYRGWGQFSRKLLDGLKLGNGHTVIQELMLSNHNLMQILADETLKETMTELNQDKLKTDDIEDVINDAYTSPSNKKALRQVLRVVEDIKHAANGQDPSWLFIETADGTGTAGKRTQSRQKQIQTVYANAAQELIDSAVRGELEDKIADKASFTDRLVLYFMQGGRDIYTGAPLNIDQLSHYDIDHILPQSLIKDDSLDNRVLVNATINREKNNVFASTLFAGKMKATWRKWHEAGLISGRKLRNLMLRPDEIDKFAKGFVARQLVETRQIIKLTEQIAAAQYPNTKIIAVKAGLSHQLREELDFPKNRDVNHYHHAFDAFLAARIGTYLLKRYPKLAPFFTYGEFAKVDVKKFREFNFIGALTHAKKNIIAKDTGEIVWDKERDIRELDRIYNFKRMLITHEVYFETADLFKQTIYAAKDSKERGGSKQLIPKKQGYPTQVYGGYTQESGSYNALVRVAEADTTAYQVIKISAQNASKIASANLKSREKGKQLLNEIVVKQLAKRRKNWKPSANSFKIVIPRFGMGTLFQNAKYGLFMVNSDTYYRNYQELWLSRENQKLLKKLFSIKYEKTQMNHDALQVYKAIIDQVEKFFKLYDINQFRAKLSDAIERFEKLPINTDGNKIGKTETLRQILIGLQANGTRSNVKNLGIKTDLGLLQVGSGIKLDKDTQIVYQSPSGLFKRRIPLADL

SEQ ID NO: 7 - protein, 1398 aa, Veillonella atypica
METQTSNQLITSHLKDYPKQDYFVGLDIGTNSVGWAVTNTSYELLKFHSHKMWGSRLFEEGESAVTRRGFRSMRRRLERRKLRLKLLEELFADAMAQVDSTFFIRLHESKYHYEDKTTGHSSKHILFIDEDYTDQDYFTEYPTIYHLRKDLMENGTDDIRKLFLAVHHILKYRGNFLYEGATFNSNAFTFEDVLKQALVNITFNCFDTNSAISSISNILMESGKTKSDKAKAIERLVDTYTVFDEVNTPDKPQKEQVKEDKKTLKAFANLVLGLSANLIDLFGSVEDIDDDLKKLQIVGDTYDEKRDELAKVWGDEIHIIDDCKSVYDAIILMSIKEPGLTISQSKVKAFDKHKEDLVILKSLLKLDRNVYNEMFKSDKKGLHNYVHYIKQGRTEETSCSREDFYKYTKKIVEGLADSKDKEYILNEIELQTLLPLQRIKDNGVIPYQLHLEELKVILDKCGPKFPFLHTVSDGFSVTEKLIKMLEFRIPYYVGPLNTHHNIDNGGFSWAVRKQAGRVTPWNFEEKIDREKSAAAFIKNLTNKCTYLFGEDVLPKSSLLYSEFMLLNELNNVRIDGKALAQGVKQHLIDSIFKQDHKKMTKNRIELFLKDNNYITKKHKPEITGLDGEIKNDLTSYRDMVRILGNNFDVSMAEDIITDITIFGESKKMLRQTLRNKFGSQLNDETIKKLSKLRYRDWGRLSKKLLKGIDGCDKAGNGAPKTIIELMRNDSYNLMEILGDKFSFMECIEEENAKLAQGQVVNPHDIIDELALSPAVKRAVWQALRIVDEVAHIKKALPSRIFVEVARTNKSEKKKKDSRQKRLSDLYSAIKKDDVLQSGLQDKEFGALKSGLANYDDAALRSKKLYLYYTQMGRCAYTGNIIDLNQLNTDNYDIDHIYPRSLTKDDSFDNLVLCERTANAKKSDIYPIDNRIQTKQKPFWAFLKHQGLISERKYERLTRIAPLTADDLSGFIARQLVETNQSVKATTTLLRRLYPDIDVVFVKAENVSDFRHNNNFIKVRSLNHHHHAKDAYLNIVVGNVYHEKFTRNFRLFFKKNGANRTYNLAKMFNYDVICTNAQDGKAWDVKTSMNTVKKMMASNDVRVTRRLLEQSGALADATIYKASVAAKAKDGAYIGMKTKYSVFADVTKYGGMTKIKNAYSIIVQYTGKKGEEIKEIVPLPIYLINRNATDIELIDYVKSVIPKAKDISIKYRKLCINQLVKVNGFYYYLGGKTNDKIYIDNAIELVVPHDIATYIKLLDKYDLLRKENKTLKASSITTSIYNINTSTVVSLSNKVGIDVFDYFMSKLRTPLYMKMKGNKVDELSSTGRSKFIKMTLEEQSIYLLEVLNLLTNSKTTFDVKPLGITGSRSTIGVKIHNLDEFKIINESITGLYSNEVTIV

SEQ ID NO: 8 - protein, 1395 aa, Treponema denticola
MKKEIKDYFLGLDVGTGSVGWAVTDTDYKLLKANRKDLWGMRCFETAETAEVRRLHRGARRRIERRKKRIKLLQELFSQEIAKTDEGFFQRMKESPFYAEDKTILQENTLFNDKDFADKTYHKAYPTINHLIKAWIENKVKPDPRLLYLACHNIIKKRGHFLFEGDFDSENQFDTSIQALFEYLREDMEVDIDADSQKVKEILKDSSLKNSEKQSRLNKILGLKPSDKQKKAITNLISGNKINFADLYDNPDLKDAEKNSISFSKDDFDALSDDLASILGDSFELLLKAKAVYNCSVLSKVIGDEQYLSFAKVKIYEKHKTDLTKLKNVIKKHFPKDYKKVFGYNKNEKNNNNYSGYVGVCKTKSKKLIINNSVNQEDFYKFLKTILSAKSEIKEVNDILTEIETGTFLPKQISKSNAEIPYQLRKMELEKILSNAEKHFSFLKQKDEKGLSHSEKIIMLLTFKIPYYIGPINDNHKKFFPDRCWVVKKEKSPSGKTTPWNFFDHIDKEKTAEAFITSRTNFCTYLVGESVLPKSSLLYSEYTVLNEINNLQIIIDGKNICDIKLKQKIYEDLFKKYKKITQKQISTFIKHEGICNKTDEVIILGIDKECTSSLKSYIELKNIFGKQVDEISTKNMLEEIIRWATIYDEGEGKTILKTKIKAEYGKYCSDEQIKKILNLKFSGWGRLSRKFLETVTSEMPGFSEPVNIITAMRETQNNLMELLSSEFTFTENIKKINSGFEDAEKQFSYDGLVKPLFLSPSVKKMLWQTLKLVKEISHITQAPPKKIFIEMAKGAELEPARTKTRLKILQDLYNNCKNDADAFSSEIKDLSGKIENEDNLRLRSDKLYLYYTQLGKCMYCGKPIEIGHVFDTSNYDIDHIYPQSKIKDDSISNRVLVCSSCNKNKEDKYPLKSEIQSKQRGFWNFLQRNNFISLEKLNRLTRATPISDDETAKFIARQLVETRQATKVAAKVLEKMFPETKIVYSKAETVSMFRNKFDIVKCREINDFHHAHDAYLNIVVGNVYNTKFTNNPWNFIKEKRDNPKIADTYNYYKVFDYDVKRNNITAWEKGKTIITVKDMLKRNTPIYTRQAACKKGELFNQTIMKKGLGQHPLKKEGPFSNISKYGGYNKVSAAYYTLIEYEEKGNKIRSLETIPLYLVKDIQKDQDVLKSYLTDLLGKKEFKILVPKIKINSLLKINGFPCHITGKTNDSFLLRPAVQFCCSNNEVLYFKKIIRFSEIRSQREKIGKTISPYEDLSFRSYIKENLWKKTKNDEIGEKEFYDLLQKKNLEIYDMLLTKHKDTIYKKRPNSATIDILVKGKEKFKSLIIENQFEVILEILKLFSATRNVSDLQHIGGSKYSGVAKIGNKISSLDNCILIYQSITGIFEKRIDLLKV

SEQ ID NO: 9 - protein, 1233 aa, Mycoplasma canis
MEKKRKVTLGFDLGIASVGWAIVDSETNQVYKLGSRLFDAPDTNLERRTQRGTRRLLRRRKYRNQKFYNLVKRTEVFGLSSREAIENRFRELSIKYPNIIELKTKALSQEVCPDEIAWILHDYLKNRGYFYDEKETKEDFDQQTVESMPSYKLNEFYKKYGYFKGALSQPTESEMKDNKDLKEAFFFDFSNKEWLKEINYFFNVQKNILSETFIEEFKKIFSFTRDISKGPGSDNMPSPYGIFGEFGDNGQGGRYEHIWDKNIGKCSIFTNEQRAPKYLPSALIFNFLNELANIRLYSTDKKNIQPLWKLSSVDKLNILLNLFNLPISEKKKKLTSTNINDIVKKESIKSIMISVEDIDMIKDEWAGKEPNVYGVGLSGLNIEESAKENKFKFQDLKILNVLINLLDNVGIKFEFKDRNDIIKNLELLDNLYLFLIYQKESNNKDSSIDLFIAKNESLNIENLKLKLKEFLLGAGNEFENHNSKTHSLSKKAIDEILPKLLDNNEGWNLEAIKNYDEEIKSQIEDNSSLMAKQDKKYLNDNFLKDAILPPNVKVTFQQAILIFNKIIQKFSKDFEIDKVVIELAREMTQDQENDALKGIAKAQKSKKSLVEERLEANNIDKSVFNDKYEKLIYKIFLWISQDFKDPYTGAQISVNEIVNNKVEIDHIIPYSLCFDDSSANKVLVHKQSNQEKSNSLPYEYIKQGHSGWNWDEFTKYVKRVFVNNVDSILSKKERLKKSENLLTASYDGYDKLGFLARNLNDTRYATILFRDQLNNYAEHHLIDNKKMFKVIAMNGAVTSFIRKNMSYDNKLRLKDRSDFSHHAYDAAIIALFSNKTKTLYNLIDPSLNGIISKRSEGYWVIEDRYTGEIKELKKEDWTSIKNNVQARKIAKEIEEYLIDLDDEVFFSRKTKRKTNRQLYNETIYGIATKTDEDGITNYYKKEKFSILDDKDIYLRLLREREKFVINQSNPEVIDQIIEIIESYGKENNIPSRDEAINIKYTKNKINYNLYLKQYMRSLTKSLDQFSEEFINQMIANKTFVLYNPTKNTTRKIKFLRLVNDVKINDIRKNQVINKFNGKNNEPKAFYENINSLGAIVFKNSANNFKTLSINTQIAIFGDKNWDIEDFKTYNMEKIEKYKEIYGIDKTYNFHSFIFPGTILLDKQNKEFYYISSIQTVRDIIEIKFLNKIEFKDENKNQDTSKTPKRLMFGIKSIMNNYEQVDISPFGINKKIFE

SEQ ID NO: 10 - protein, 1150 aa, Enterococcus faecalis
MYSIGLDLGISSVGWSVIDERTGNVIDLGVRLFSAKNSEKNLERRTNRGGRRLIRRKTNRLKDAKKILAAVGFYEDKSLKNSCPYQLRVKGLTEPLSRGEIYKVTLHILKKRGISYLDEVDTEAAKESQDYKEQVRKNAQLLTKYTPGQIQLQRLKENNRVKTGINAQGNYQLNVFKVSAYANELATILKTQQAFYPNELTDDWIALFVQPGIAEEAGLIYRKRPYYHGPGNEANNSPYGRWSDFQKTGEPATNIFDKLIGKDFQGELRASGLSLSAQQYNLLNDLTNLKIDGEVPLSSEQKEYILTELMTKEFTRFGVNDVVKLLGVKKERLSGWRLDKKGKPEIHTLKGYRNWRKIFAEAGIDLATLPTETIDCLAKVLTLNTEREGIENTLAFELPELSESVKLLVLDRYKELSQSISTQSWHRFSLKTLHLLIPELMNATSEQNTLLEQFQLKSDVRKRYSEYKKLPTKDVLAEIYNPTVNKTVSQAFKVIDALLVKYGKEQIRYITIEMPRDDNEEDEKKRIKELHAKNSQRKNDSQSYFMQKSGWSQEKFQTTIQKNRRFLAKLLYYYEQDGICAYTGLPISPELLVSDSTEIDHIIPISISLDDSINNKVLVLSKANQVKGQQTPYDAWMDGSFKKINGKFSNWDDYQKWVESRHFSHKKENNLLETRNIFDSEQVEKFLARNLNDTRYASRLVLNTLQSFFTNQETKVRVVNGSFTHTLRKKWGADLDKTRETHHHHAVDATLCAVTSFVKVSRYHYAVKEETGEKVMREIDFETGEIVNEMSYWEFKKSKKYERKTYQVKWPNFREQLKPVNLHPRIKFSHQVDRKANRKLSDATIYSVREKTEVKTLKSGKQKITTDEYTIGKIKDIYTLDGWEAFKKKQDKLLMKDLDEKTYERLLSIAETTPDFQEVEEKNGKVKRVKRSPFAVYCEENDIPAIQKYAKKNNGPLIRSLKYYDGKLNKHINITKDSQGRPVEKTKNGRKVTLQSLKPYRYDIYQDLETKAYYTVQLYYSDLRFVEGKYGITEKEYMKKVAEQTKGQVVRFCFSLQKNDGLEIEWKDSQRYDVRFYNFQSANSINFKGLEQEMMPAENQFKQKPYNNGAINLNIAKYGKEGKKLRKFNTDILGKKHYLFYEKEPKNIIK

SEQ ID NO: 11 - protein, 1269 aa, Mycoplasma gallisepticum
MNNSIKSKPEVTIGLDLGVGSVGWAIVDNETNIIHHLGSRLFSQAKTAEDRRSFRGVRRLIRRRKYKLKRFVNLIWKYNSYFGFKNKEDILNNYQEQQKLHNTVLNLKSEALNAKIDPKALSWILHDYLKNRGHFYEDNRDFNVYPTKELAKYFDKYGYYKGIIDSKEDNDNKLEEELTKYKFSNKHWLEEVKKVLSNQTGLPEKFKEEYESLFSYVRNYSEGPGSINSVSPYGIYHLDEKEGKVVQKYNNIWDKTIGKCNIFPDEYRAPKNSPIAMIFNEINELSTIRSYSIYLTGWFINQEFKKAYLNKLLDLLIKTNGEKPIDARQFKKLREETIAESIGKETLKDVENEEKLEKEDHKWKLKGLKLNTNGKIQYNDLSSLAKFVHKLKQHLKLDFLLEDQYATLDKINFLQSLFVYLGKHLRYSNRVDSANLKEFSDSNKLFERILQKQKDGLFKLFEQTDKDDEKILAQTHSLSTKAMLLAITRMTNLDNDEDNQKNNDKGWNFEAIKNFDQKFIDITKKNNNLSLKQNKRYLDDRFINDAILSPGVKRILREATKVFNAILKQFSEEYDVTKVVIELARELSEEKELENTKNYKKLIKKNGDKISEGLKALGISEDEIKDILKSPTKSYKFLLWLQQDHIDPYSLKEIAFDDIFTKTEKFEIDHIIPYSISFDDSSSNKLLVLAESNQAKSNQTPYEFISSGNAGIKWEDYEAYCRKFKDGDSSLLDSTQRSKKFAKMMKTDTSSKYDIGFLARNLNDTRYATIVFRDALEDYANNHLVEDKPMFKVVCINGSVTSFLRKNFDDSSYAKKDRDKNIHHAVDASIISIFSNETKTLFNQLTQFADYKLFKNTDGSWKKIDPKTGVVTEVTDENWKQIRVRNQVSEIAKVIEKYIQDSNIERKARYSRKIENKTNISLFNDTVYSAKKVGYEDQIKRKNLKTLDIHESAKENKNSKVKRQFVYRKLVNVSLLNNDKLADLFAEKEDILMYRANPWVINLAEQIFNEYTENKKIKSQNVFEKYMLDLTKEFPEKFSEFLVKSMLRNKTAIIYDDKKNIVHRIKRLKMLSSELKENKLSNVIIRSKNQSGTKLSYQDTINSLALMIMRSIDPTAKKQYIRVPLNTLNLHLGDHDFDLHNMDAYLKKPKFVKYLKANEIGDEYKPWRVLTSGTLLIHKKDKKLMYISSFQNLNDVIEIKNLIETEYKENDDSDSKKKKKANRFLMTLSTILNDYILLDAKDNFDILGLSKNRIDEILNSKLGLDKIVK

SEQ ID NO: 12 - protein, 1384 aa, Coriobacterium glomerans
MKLRGIEDDYSIGLDMGTSSVGWAVTDERGTLAHFKRKPTWGSRLFREAQTAAVARMPRGQRRRYVRRRWRLDLLQKLFEQQMEQADPDFFIRLRQSRLLRDDRAEEHADYRWPLFNDCKFTERDYYQRFPTIYHVRSWLMETDEQADIRLIYLALHNIVKHRGNFLREGQSLSAKSARPDEALNHLRETLRVWSSERGFECSIADNGSILAMLTHPDLSPSDRRKKIAPLFDVKSDDAAADKKLGIALAGAVIGLKTEFKNIFGDFPCEDSSIYLSNDEAVDAVRSACPDDCAELFDRLCEVYSAYVLQGLLSYAPGQTISANMVEKYRRYGEDLALLKKLVKIYAPDQYRMFFSGATYPGTGIYDAAQARGYTKYNLGPKKSEYKPSESMQYDDFRKAVEKLFAKTDARADERYRMMMDRFDKQQFLRRLKTSDNGSIYHQLHLEELKAIVENQGRFYPFLKRDADKLVSLVSFRIPYYVGPLSTRNARTDQHGENRFAWSERKPGMQDEPIFPWNWESIIDRSKSAEKFILRMTGMCTYLQQEPVLPKSSLLYEEFCVLNELNGAHWSIDGDDEHRFDAADREGIIEELFRRKRTVSYGDVAGWMERERNQIGAHVCGGQGEKGFESKLGSYIFFCKDVFKVERLEQSDYPMIERIILWNTLFEDRKILSQRLKEEYGSRLSAEQIKTICKKRFTGWGRLSEKFLTGITVQVDEDSVSIMDVLREGCPVSGKRGRAMVMMEILRDEELGFQKKVDDFNRAFFAENAQALGVNELPGSPAVRRSLNQSIRIVDEIASIAGKAPANIFIEVTRDEDPKKKGRRTKRRYNDLKDALEAFKKEDPELWRELCETAPNDMDERLSLYFMQRGKCLYSGRAIDIHQLSNAGIYEVDHIIPRTYVKDDSLENKALVYREENQRKTDMLLIDPEIRRRMSGYWRMLHEAKLIGDKKFRNLLRSRIDDKALKGFIARQLVETGQMVKLVRSLLEARYPETNIISVKASISHDLRTAAELVKCREANDFHHAHDAFLACRVGLFIQKRHPCVYENPIGLSQVVRNYVRQQADIFKRCRTIPGSSGFIVNSFMTSGFDKETGEIFKDDWDAEAEVEGIRRSLNFRQCFISRMPFEDHGVFWDATIYSPRAKKTAALPLKQGLNPSRYGSFSREQFAYFFIYKARNPRKEQTLFEFAQVPVRLSAQIRQDENALERYARELAKDQGLEFIRIERSKILKNQLIEIDGDRLCITGKEEVRNACELAFAQDEMRVIRMLVSEKPVSRECVISLFNRILLHGDQASRRLSKQLKLALLSEAFSEASDNVQRNVVLGLIAIFNGSTNMVNLSDIGGSKFAGNVRIKYKKELASPKVNVHLIDQSVTGMFERRTKIGL

SEQ ID NO: 13 - protein, 1374 aa, Fusobacterium nucleatum
MKKQKFSDYYLGFDIGTNSVGWCVTDLDYNVLRFNKKDMWGSRLFDEAKTAAERRVQRNSRRRLKRRKWRLNLLEEIFSDEIMKIDSNFFRRLKESSLWLEDKNSKEKFTLFNDDNYKDYDFYKQYPTIFHLRDELIKNPEKKDIRLIYLALHSIFKSRGHFLFEGQNLKEIKNFETLYNNLISFLEDNGINKSIDKDNIEKLEKIICDSGKGLKDKEKEFKGIFNSDKQLVAIFKLSVGSSVSLNDLFDTDEYKKEEVEKEKISFREQIYEDDKPIYYSILGEKIELLDIAKSFYDFMVLNNILSDSNYISEAKVKLYEEHKKDLKNLKYIIRKYNKENYDKLFKDKNENNYPAYIGLNKEKDKKEVVEKSRLKIDDLIKVIKGYLPKPERIEEKDKTIFNEILNKIELKTILPKQRISDNGTLPYQIHEVELEKILENQSKYYDFLNYEENGVSTKDKLLKTFKFRIPYYVGPLNSYHKDKGGNSWIVRKEEGKILPWNFEQKVDIEKSAEEFIKRMTNKCTYLNGEDVIPKDSFLYSEYIILNELNKVQVNDEFLNEENKRKIIDELFKENKKVSEKKFKEYLLVNQIANRTVELKGIKDSFNSNYVSYIKFKDIFGEKLNLDIYKEISEKSILWKCLYGDDKKIFEKKIKNEYGDILNKDEIKKINSFKFNTWGRLSEKLLTGIEFINLETGECYSSVMEALRRTNYNLMELLSSKFTLQESIDNENKEMNEVSYRDLIEESYVSPSLKRAILQTLKIYEEIKKITGRVPKKVFIEMARGGDESMKNKKIPARQEQLKKLYDSCGNDIANFSIDIKEMKNSLSSYDNNSLRQKKLYLYYLQFGKCMYTGREIDLDRLLQNNDTYDIDHIYPRSKVIKDDSFDNLVLVLKNENAEKSNEYPVKKEIQEKMKSFWRFLKEKNFISDEKYKRLTGKDDFELRGFMARQLVNVRQTTKEVGKILQQIEPEIKIVYSKAEIASSFREMFDFIKVRELNDTHHAKDAYLNIVAGNVYNTKFTEKPYRYLQEIKENYDVKKIYNYDIKNAWDKENSLEIVKKNMEKNTVNITRFIKEEKGELFNLNPIKKGETSNEIISIKPKLYDGKDNKLNEKYGYYTSLKAAYFIYVEHEKKNKKVKTFERITRIDSTLIKNEKNLIKYLVSQKKLLNPKIIKKIYKEQTLIIDSYPYTFTGVDSNKKVELKNKKQLYLEKKYEQILKNALKFVEDNQGETEENYKFIYLKKRNNNEKNETIDAVKERYNIEFNEMYDKFLEKLSSKDYKNYINNKLYTNFLNSKEKFKKLKLWEKSLILREFLKIFNKNTYGKYEIKDSQTKEKLFSFPEDTGRIRLGQSSLGNNKELLEESVTGLFVKKIKL

SEQ ID NO: 14 - protein, 1348 aa, Finegoldia magna
MKSEKKYYIGLDVGTNSVGWAVTDEFYNILRAKGKDLWGVRLFEKADTAANTRIFRSGRRRNDRKGMRLQILREIFEDEIKKVDKDFYDRLDESKFWAEDKKVSGKYSLFNDKNFSDKQYFEKFPTIFHLRKYLMEEHGKVDIRYYFLAINQMMKRRGHFLIDGQISHVTDDKPLKEQLILLINDLLKIELEEELMDSIFEILADVNEKRTDKKNNLKELIKGQDFNKQEGNILNSIFESIVTGKAKIKNIISDEDILEKIKEDNKEDFVLTGDSYEENLQYFEEVLQENITLFNTLKSTYDFLILQSILKGKSTLSDAQVERYDEHKKDLEILKKVIKKYDEDGKLFKQVFKEDNGNGYVSYIGYYLNKNKKITAKKKISNIEFTKYVKGILEKQCDCEDEDVKYLLGKIEQENFLLKQISSINSVIPHQIHLFELDKILENLAKNYPSFNNKKEEFTKIEKIRKTFTFRIPYYVGPLNDYHKNNGGNAWIFRNKGEKIRPWNFEKIVDLHKSEEEFIKRMLNQCTYLPEETVLPKSSILYSEYMVLNELNNLRINGKPLDTDVKLKLIEELFKKKTKVTLKSIRDYMVRNNFADKEDFDNSEKNLEIASNMKSYIDFNNILEDKFDVEMVEDLIEKITIHTGNKKLLKKYIEETYPDLSSSQIQKIINLKYKDWGRLSRKLLDGIKGTKKETEKTDTVINFLRNSSDNLMQIIGSQNYSFNEYIDKLRKKYIPQEISYEVVENLYVSPSVKKMIWQVIRVTEEITKVMGYDPDKIFIEMAKSEEEKKTTISRKNKLLDLYKAIKKDERDSQYEKLLTGLNKLDDSDLRSRKLYLYYTQMGRDMYTGEKIDLDKLFDSTHYDKDHIIPQSMKKDDSIINNLVLVNKNANQTTKGNIYPVPSSIRNNPKIYNYWKYLMEKEFISKEKYNRLIRNTPLTNEELGGFINRQLVETRQSTKAIKELFEKFYQKSKIIPVKASLASDLRKDMNTLKSREVNDLHHAHDAFLNIVAGDVWNREFTSNPINYVKENREGDKVKYSLSKDFTRPRKSKGKVIWTPEKGRKLIVDTLNKPSVLISNESHVKKGELFNATIAGKKDYKKGKIYLPLKKDDRLQDVSKYGGYKAINGAFFFLVEHTKSKKRIRSIELFPLHLLSKFYEDKNTVLDYAINVLQLQDPKIIIDKINYRTEIIIDNFSYLISTKSNDGSITVKPNEQMYWRVDEISNLKKIENKYKKDAILTEEDRKIMESYIDKIYQQFKAGKYKNRRTTDTIIEKYEIIDLDTLDNKQLYQLLVAFISLSYKTSNNAVDFTVIGLGTECGKPRITNLPDNTYLVYKSITGIYEKRIRIK

SEQ ID NO: 15 - protein, 1389 aa, Oenococcus kitaharae
MARDYSVGLDIGTSSVGWAAIDNKYHLIRAKSKNLIGVRLFDSAVTAEKRRGYRTTRRRLSRRHWRLRLLNDIFAGPLTDFGDENFLARLKYSWVHPQDQSNQAHFAAGLLFDSKEQDKDFYRKYPTIYHLRLALMNDDQKHDLREVYLAIHHLVKYRGHFLIEGDVKADSAFDVHTFADAIQRYAESNNSDENLLGKIDEKKLSAALTDKHGSKSQRAETAETAFDILDLQSKKQIQAILKSVVGNQANLMAIFGLDSSAISKDEQKNYKFSFDDADIDEKIADSEALLSDTEFEFLCDLKAAFDGLTLKMLLGDDKTVSAAMVRRFNEHQKDWEYIKSHIRNAKNAGNGLYEKSKKFDGINAAYLALQSDNEDDRKKAKKIFQDEISSADIPDDVKADFLKKIDDDQFLPIQRTKNNGTIPHQLHRNELEQIIEKQGIYYPFLKDTYQENSHELNKITALINFRVPYYVGPLVEEEQKIADDGKNIPDPTNHWMVRKSNDTITPWNLSQVVDLDKSGRRFIERLTGTDTYLIGEPTLPKNSLLYQKFDVLQELNNIRVSGRRLDIRAKQDAFEHLFKVQKTVSATNLKDFLVQAGYISEDTQIEGLADVNGKNFNNALTTYNYLVSVLGREFVENPSNEELLEEITELQTVFEDKKVLRRQLDQLDGLSDHNREKLSRKHYTGWGRISKKLLTTKIVQNADKIDNQTFDVPRMNQSIIDTLYNTKMNLMEIINNAEDDFGVRAWIDKQNTTDGDEQDVYSLIDELAGPKEIKRGIVQSFRILDDITKAVGYAPKRVYLEFARKTQESHLTNSRKNQLSTLLKNAGLSELVTQVSQYDAAALQNDRLYLYFLQQGKDMYSGEKLNLDNLSNYDIDHIIPQAYTKDNSLDNRVLVSNITNRRKSDSSNYLPALIDKMRPFWSVLSKQGLLSKHKFANLTRTRDFDDMEKERFIARSLVETRQIIKNVASLIDSHFGGETKAVAIRSSLTADMRRYVDIPKNRDINDYHHAFDALLFSTVGQYTENSGLMKKGQLSDSAGNQYNRYIKEWIHAARLNAQSQRVNPFGFVVGSMRNAAPGKLNPETGEITPEENADWSIADLDYLHKVMNFRKITVTRRLKDQKGQLYDESRYPSVLHDAKSKASINFDKHKPVDLYGGFSSAKPAYAALIKFKNKFRLVNVLRQWTYSDKNSEDYILEQIRGKYPKAEMVLSHIPYGQLVKKDGALVTISSATELHNFEQLWLPLADYKLINTLLKTKEDNLVDILHNRLDLPEMTIESAFYKAFDSILSFAFNRYALHQNALVKLQAHRDDFNALNYEDKQQTLERILDALHASPASSDLKKINLSSGFGRLFSPSHFTLADTDEFIFQSVTGLFSTQKTVAQLYQETK

SEQ ID NO: 16 - protein, 1364 aa, Peptoniphilus duerdenii
MKNLKEYYIGLDIGTASVGWAVTDESYNIPKFNGKKMWGVRLFDDAKTAEERRTQRGSRRRLNRRKERINLLQDLFATEISKVDPNFFLRLDNSDLYREDKDEKLKSKYTLFNDKDFKDRDYHKKYPTIHHLIMDLIEDEGKKDIRLLYLACHYLLKNRGHFIFEGQKFDTKNSFDKSINDLKIHLRDEYNIDLEFNNEDLIEIITDTTLNKTNKKKELKNIVGDTKFLKAISAIMIGSSQKLVDLFEDGEFEETTVKSVDFSTTAFDDKYSEYEEALGDTISLLNILKSIYDSSILENLLKDADKSKDGNKYISKAFVKKFNKHGKDLKTLKRIIKKYLPSEYANIFRNKSINDNYVAYTKSNITSNKRTKASKFTKQEDFYKFIKKHLDTIKETKLNSSENEDLKLIDEMLTDIEFKTFIPKLKSSDNGVIPYQLKLMELKKILDNQSKYYDFLNESDEYGTVKDKVESIMEFRIPYYVGPLNPDSKYAWIKRENTKITPWNFKDIVDLDSSREEFIDRLIGRCTYLKEEKVLPKASLIYNEFMVLNELNNLKLNEFLITEEMKKAIFEELFKTKKKVTLKAVSNLLKKEFNLTGDILLSGTDGDFKQGLNSYIDFKNIIGDKVDRDDYRIKIEEIIKLIVLYEDDKTYLKKKIKSAYKNDFTDDEIKKIAALNYKDWGRLSKRFLTGIEGVDKTTGEKGSIIYFMREYNLNLMELMSGHYTFTEEVEKLNPVENRELCYEMVDELYLSPSVKRMLWQSLRVVDEIKRIIGKDPKKIFIEMARAKEAKNSRKESRKNKLLEFYKFGKKAFINEIGEERYNYLLNEINSEEESKFRWDNLYLYYTQLGRCMYSLEPIDLADLKSNNIYDQDHIYPKSKIYDDSLENRVLVKKNLNHEKGNQYPIPEKVLNKNAYGFWKILFDKGLIGQKKYTRLTRRTPFEERELAEFIERQIVETRQATKETANLLKNICQDSEIVYSKAENASRFRQEFDIIKCRTVNDLHHMHDAYLNIVVGNVYNTKFTKNPLNFIKDKDNVRSYNLENMFKYDVVRGSYTAWIADDSEGNVKAATIKKVKRELEGKNYRFTRMSYIGTGGLYDQNLMRKGKGQIPQKENTNKSNIEKYGGYNKASSAYFALIESDGKAGRERTLETIPIMVYNQEKYGNTEAVDKYLKDNLELQDPKILKDKIKINSLIKLDGFLYNIKGKTGDSLSIAGSVQLIVNKEEQKLIKKMDKFLVKKKDNKDIKVTSFDNIKEEELIKLYKTLSDKLNNGIYSNKRNNQAKNISEALDKFKEISIEEKIDVLNQIILLFQSYNNGCNLKSIGLSAKTGVVFIPKKLNYKECKLINQSITGLFENEVDLLNL

SEQ ID NO: 17 - protein, 1338 aa, Coprococcus catus
MKQEYFLGLDMGTGSLGWAVTDSTYQVMRKHGKALWGTRLFESASTAEERRMFRTARRRLDRRNWRIQVLQEIFSEEISKVDPGFFLRMKESKYYPEDKRDAEGNCPELPYALFVDDNYTDKNYHKDYPTIYHLRKMLMETTEIPDIRLVYLVLHHMMKHRGHFLLSGDISQIKEFKSTFEQLIQNIQDEELEWHISLDDAAIQFVEHVLKDRNLTRSTKKSRLIKQLNAKSACEKAILNLLSGGTVKLSDIFNNKELDESERPKVSFADSGYDDYIGIVEAELAEQYYIIASAKAVYDWSVLVEILGNSVSISEAKIKVYQKHQADLKTLKKIVRQYMTKEDYKRVFVDTEEKLNNYSAYIGMTKKNGKKVDLKSKQCTQADFYDFLKKNVIKVIDHKEITQEIESEIEKENFLPKQVTKDNGVIPYQVHDYELKKILDNLGTRMPFIKENAEKIQQLFEFRIPYYVGPLNRVDDGKDGKFTWSVRKSDARIYPWNFTEVIDVEASAEKFIRRMTNKCTYLVGEDVLPKDSLVYSKFMVLNELNNLRLNGEKISVELKQRIYEELFCKYRKVTRKKLERYLVIEGIAKKGVEITGIDGDFKASLTAYHDFKERLTDVQLSQRAKEAIVLNVVLFGDDKKLLKQRLSKMYPNLTTGQLKGICSLSYQGWGRLSKTFLEEITVPAPGTGEVWNIMTALWQTNDNLMQLLSRNYGFTNEVEEFNTLKKETDLSYKTVDELYVSPAVKRQIWQTLKVVKEIQKVMGNAPKRVFVEMAREKQEGKRSDSRKKQLVELYRACKNEERDWITELNAQSDQQLRSDKLFLYYIQKGRCMYSGETIQLDELWDNTKYDIDHIYPQSKTMDDSLNNRVLVKKNYNAIKSDTYPLSLDIQKKMMSFWKMLQQQGFITKEKYVRLVRSDELSADELAGFIERQIVETRQSTKAVATILKEALPDTEIVYVKAGNVSNFRQTYELLKVREMNDLHHAKDAYLNIVVGNAYFVKFTKNAAWFIRNNPGRSYNLKRMFEFDIERSGEIAWKAGNKGSIVTVKKVMQKNNILVTRKAYEVKGGLFDQQIMKKGKGQVPIKGNDERLADIEKYGGYNKAAGTYFMLVKSLDKKGKEIRTIEFVPLYLKNQIEINHESAIQYLAQERGLNSPEILLSKIKIDTLFKVDGFKMWLSGRTGNQLIFKGANQLILSHQEAAILKGVVKYVNRKNENKDAKLSERDGMTEEKLLQLYDTFLDKLSNTVYSIRLSAQIKTLTEKRAKFIGLSNEDQCIVLNEILHMFQCQSGSANLKLIGGPGSAGILVMNNNITACKQISVINQSPTGIYEKEIDLIKL

SEQ ID NO: 18 - protein, 1334 aa, Staphylococcus pseudintermedius
MGRKPYILSLDIGTGSVGYACMDKGFNVLKYHDKDALGVYLFDGALTAQERRQFRTSRRRKNRRIKRLGLLQELLAPLVQNPNFYQFQRQFAWKNDNMDFKNKSLSEVLSFLGYESKKYPTIYHLQEALLLKDEKFDPELIYMALYHLVKYRGHFLFDHLKIENLTNNDNMHDFVELIETYENLNNIKLNLDYEKTKVIYEILKDNEMTKNDRAKRVKNMEKKLEQFSIMLLGLKFNEGKLFNHADNAEELKGANQSHTFADNYEENLTPFLTVEQSEFIERANKIYLSLTLQDILKGKKSMAMSKVAAYDKFRNELKQVKDIVYKADSTRTQFKKIFVSSKKSLKQYDATPNDQTFSSLCLFDQYLIRPKKQYSLLIKELKKIIPQDSELYFEAENDTLLKVLNTTDNASIPMQINLYEAETILRNQQKYHAEITDEMIEKVLSLIQFRIPYYVGPLVNDHTASKFGWMERKSNESIKPWNFDEVVDRSKSATQFIRRMTNKCSYLINEDVLPKNSLLYQEMEVLNELNATQIRLQTDPKNRKYRMMPQIKLFAVEHIFKKYKTVSHSKFLEIMLNSNHRENFMNHGEKLSIFGTQDDKKFASKLSSYQDMTKIFGDIEGKRAQIEEIIQWITIFEDKKILVQKLKECYPELTSKQINQLKKLNYSGWGRLSEKLLTHAYQGHSIIELLRHSDENFMEILTNDVYGFQNFIKEENQVQSNKIQHQDIANLTTSPALKKGIWSTIKLVRELTSIFGEPEKIIMEFATEDQQKGKKQKSRKQLWDDNIKKNKLKSVDEYKYIIDVANKLNNEQLQQEKLWLYLSQNGKCMYSGQSIDLDALLSPNATKHYEVDHIFPRSFIKDDSIDNKVLVIKKMNQTKGDQVPLQFIQQPYERIAYWKSLNKAGLISDSKLHKLMKPEFTAMDKEGFIQRQLVETRQISVHVRDFLKEEYPNTKVIPMKAKMVSEFRKKFDIPKIRQMNDAHHAIDAYLNGVVYHGAQLAYPNVDLFDFNFKWEKVREKWKALGEFNTKQKSRELFFFKKLEKMEVSQGERLISKIKLDMNHFKINYSRKLANIPQQFYNQTAVSPKTAELKYESNKSNEVVYKGLTPYQTYVVAIKSVNKKGKEKMEYQMIDHYVFDFYKFQNGNEKELALYLAQRENKDEVLDAQIVYSLNKGDLLYINNHPCYFVSRKEVINAKQFELTVEQQLSLYNVMNNKETNVEKLLIEYDFIAEKVINEYHHYLNSKLKEKRVRTFFSESNQTHEDFIKALDELFKVVTASATRSDKIGSRKNSMTHRAFLGKGKDVKIAYTSISGLKTTKPKSLFKLAESRNEL

SEQ ID NO: 19 - protein, 1420 aa, Bifidobacterium bifidum
MSRKNYVDDYAISLDIGNASVGWSAFTPNYRLVRAKGHELIGVRLFDPADTAESRRMARTTRRRYSRRRWRLRLLDALFDQALSEIDPSFLARRKYSWVHPDDENNADCWYGSVLFDSNEQDKRFYEKYPTIYHLRKALMEDDSQHDIREIYLAIHHMVKYRGNFLVEGTLESSNAFKEDELLKLLGRITRYEMSEGEQNSDIEQDDENKLVAPANGQLADALCATRGSRSMRVDNALEALSAVNDLSREQRAIVKAIFAGLEGNKLDLAKIFVSKEFSSENKKILGIYFNKSDYEEKCVQIVDSGLLDDEEREFLDRMQGQYNAIALKQLLGRSTSVSDSKCASYDAHRANWNLIKLQLRTKENEKDINENYGILVGWKIDSGQRKSVRGESAYENMRKKANVFFKKMIETSDLSETDKNRLIHDIEEDKLFPIQRDSDNGVIPHQLHQNELKQIIKKQGKYYPFLLDAFEKDGKQINKIEGLLTFRVPYFVGPLVVPEDLQKSDNSENHWMVRKKKGEITPWNFDEMVDKDASGRKFIERLVGTDSYLLGEPTLPKNSLLYQEYEVLNELNNVRLSVRTGNHWNDKRRMRLGREEKTLLCQRLFMKGQTVTKRTAENLLRKEYGRTYELSGLSDESKFTSSLSTYGKMCRIFGEKYVNEHRDLMEKIVELQTVFEDKETLLHQLRQLEGISEADCALLVNTHYTGWGRLSRKLLTTKAGECKISDDFAPRKHSIIEIMRAEDRNLMEIITDKQLGFSDWIEQENLGAENGSSLMEVVDDLRVSPKVKRGIIQSIRLIDDISKAVGKRPSRIFLELADDIQPSGRTISRKSRLQDLYRNANLGKEFKGIADELNACSDKDLQDDRLFLYYTQLGKDMYTGEELDLDRLSSAYDIDHIIPQAVTQNDSIDNRVLVARAENARKTDSFTYMPQIADRMRNFWQILLDNGLISRVKFERLTRQNEFSEREKERFVQRSLVETRQIMKNVATLMRQRYGNSAAVIGLNAELTKEMHRYLGFSHKNRDINDYHHAQDALCVGIAGQFAANRGFFADGEVSDGAQNSYNQYLRDYLRGYREKLSAEDRKQGRAFGFIVGSMRSQDEQKRVNPRTGEVVWSEEDKDYLRKVMNYRKMLVTQKVGDDFGALYDETRYAATDPKGIKGIPFDGAKQDTSLYGGFSSAKPAYAVLIESKGKTRLVNVTMQEYSLLGDRPSDDELRKVLAKKKSEYAKANILLRHVPKMQLIRYGGGLMVIKSAGELNNAQQLWLPYEEYCYFDDLSQGKGSLEKDDLKKLLDSILGSVQCLYPWHRFTEEELADLHVAFDKLPEDEKKNVITGIVSALHADAKTANLSIVGMTGSWRRMNNKSGYTFSDEDEFIFQSPSGLFEKRVTVGELKRKAKKEVNSKYRTNEKRLPTLSGASQP

SEQ ID NO: 20 - protein, 1421 aa, Streptococcus sanguinis
MTKFNKNYSIGLDIGVSSVGYAVVTEDYRVPAFKFKVLGNTEKEKIKKNLIGSTTFVSAQPAKGTRVFRVNRRRIDRRNHRITYLRDIFQKEIEKVDKNFYRRLDESFRVLGDKSEDLQIKQPFFGDKELETAYHKKYPTIYHLRKHLADADKNSPVADIREVYMAISHILKYRGHFLTLDKINPNNINMQNSWIDFIESCQEVFDLEISDESKNIADIFKSSENRQEKVKKILPYFQQELLKKDKSIFKQLLQLLFGLKTKFKDCFELEEEPDLNFSKENYDENLENFLGSLEEDFSDVFAKLKVLRDTILLSGMLTYTGATHARFSATMVERYEEHRKDLQRFKFFIKQNLSEQDYLDIFGRKTQNGFDVDKETKGYVGYITNKMVLTNPQKQKTIQQNFYDYISGKITGIEGAEYFLNKISDGTFLRKLRTSDNGAIPNQIHAYELEKIIERQGKDYPFLLENKDKLLSILTFKIPYYVGPLAKGSNSRFAWIKRATSSDILDDNDEDTRNGKIRPWNYQKLINMDETRDAFITNLIGNDIILLNEKVLPKRSLIYEEVMLQNELTRVKYKDKYGKAHFFDSELRQNIINGLFKNNSKRVNAKSLIKYLSDNHKDLNAIEIVSGVEKGKSFNSTLKTYNDLKTIFSEELLDSEIYQKELEEIIKVITVFDDKKSIKNYLTKFFGHLEILDEEKINQLSKLRYSGWGRYSAKLLLDIRDEDTGFNLLQFLRNDEENRNLTKLISDNTLSFEPKIKDIQSKSTIEDDIFDEIKKLAGSPAIKRGILNSIKIVDELVQIIGYPPHNIVIEMARENMTTEEGQKKAKTRKTKLESALKNIENSLLENGKVPHSDEQLQSEKLYLYYLQNGKDMYTLDKTGSPAPLYLDQLDQYEVDHIIPYSFLPIDSIDNKVLTHRENNQQKLNNIPDKETVANMKPFWEKLYNAKLISQTKYQRLTTSERTPDGVLTESMKAGFIERQLVETRQIIKHVARILDNRFSDTKIITLKSQLITNFRNTFHIAKIRELNDYHHAHDAYLAVVVGQTLLKVYPKLAPELIYGHHAHFNRHEENKATLRKHLYSNIMRFFNNPDSKVSKDIWDCNRDLPIIKDVIYNSQINFVKRTMIKKGAFYNQNPVGKFNKQLAANNRYPLKTKALCLDTSIYGGYGPMNSALSIIIIAERFNEKKGKIETVKEFHDIFIIDYEKFNNNPFQFLNDTSENGFLKKNNINRVLGFYRIPKYSLMQKIDGTRMLFESKSNLHKATQFKLTKTQNELFFHMKRLLTKSNLMDLKSKSAIKESQNFILKHKEEFDNISNQLSAFSQKMLGNTTSLKNLIKGYNERKIKEIDIRDETIKYFYDNFIKMFSFVKSGAPKDINDFFDNKCTVARMRPKPDKKLLNATLIHQSITGLYETRIDLSKLGED

SEQ ID NO: 21 - protein, 1391 aa, Eubacterium yurii
MENKQYYIGLDVGTNSVGWAVTDTSYNLLRAKGKDMWGARLFEKANTAAERRTKRTSRRRSEREKARKAMLKELFADEINRVDPSFFIRLEESKFFLDDRSENNRQRYTLFNDATFTDKDYYEKYKTIFHLRSALINSDEKFDVRLVFLAILNLFSHRGHFLNASLKGDGDIQGMDVFYNDLVESCEYFEIELPRITNIDNFEKILSQKGKSRTKILEELSEELSISKKDKSKYNLIKLISGLEASVVELYNIEDIQDENKKIKIGFRESDYEESSLKVKEIIGDEYFDLVERAKSVHDMGLLSNIIGNSKYLCEARVEAYENHHKDLLKIKELLKKYDKKAYNDMFRKMTDKNYSAYVGSVNSNIAKERRSVDKRKIEDLYKYIEDTALKNIPDDNKDKIEILEKIKLGEFLKKQLTASNGVIPNQLQSRELRAILKKAENYLPFLKEKGEKNLTVSEMIIQLFEFQIPYYVGPLDKNPKKDNKANSWAKIKQGGRILPWNFEDKVDVKGSRKEFIEKMVRKCTYISDEHTLPKQSLLYEKFMVLNEINNIKIDGEKISVEAKQKIYNDLFVKGKKVSQKDIKKELISLNIMDKDSVLSGTDTVCNAYLSSIGKFTGVFKEEINKQSIVDMIEDIIFLKTVYGDEKRFVKEEIVEKYGDEIDKDKIKRILGFKFSNWGNLSKSFLELEGADVGTGEVRSIIQSLWETNFNLMELLSSRFTYMDELEKRVKKLEKPLSEWTIEDLDDMYLSSPVKRMIWQSMKIVDEIQTVIGYAPKRIFVEMTRSEGEKVRTKSRKDRLKELYNGIKEDSKQWVKELDSKDESYFRSKKMYLYYLQKGRCMYSGEVIELDKLMDDNLYDIDHIYPRSFVKDDSLDNLVLVKKEINNRKQNDPITPQIQASCQGFWKILHDQGFMSNEKYSRLTRKTQEFSDEEKLSFINRQIVETGQATKCMAQILQKSMGEDVDVVFSKARLVSEFRHKFELFKSRLINDFHHANDAYLNIVVGNSYFVKFTRNPANFIKDARKNPDNPVYKYHMDRFFERDVKSKSEVAWIGQSEGNSGTIVIVKKTMAKNSPLITKKVEEGHGSITKETIVGVKEIKFGRNKVEKADKTPKKPNLQAYRPIKTSDERLCNILRYGGRTSISISGYCLVEYVKKRKTIRSLEAIPVYLGRKDSLSEEKLLNYFRYNLNDGGKDSVSDIRLCLPFISTNSLVKIDGYLYYLGGKNDDRIQLYNAYQLKMKKEEVEYIRKIEKAVSMSKFDEIDREKNPVLTEEKNIELYNKIQDKFENTVFSKRMSLVKYNKKDLSFGDFLKNKKSKFEEIDLEKQCKVLYNIIFNLSNLKEVDLSDIGGSKSTGKCRCKKNITNYKEFKLIQQSITGLYSCEKDLMTI

SEQ ID NO: 22 - protein, 1358 aa, unknown
  Cas9 protein from Acidaminococcus species D21
MGKMYYLGLDIGTNSVGYAVTDPSYHLLKFKGEPMWGAHVFAAGNQSAERRSFRTSRRRLDRRQQRVKLVQEIFAPVISPIDPRFFIRLHESALWRDDVAETDKHIFFNDPTYTDKEYYSDYPTIHHLIVDLMESSEKHDPRLVYLAVAWLVAHRGHFLNEVDKDNIGDVLSFDAFYPEFLAFLSDNGVSPWVCESKALQATLLSRNSVNDKYKALKSLIFGSQKPEDNFDANISEDGLIQLLAGKKVKVNKLFPQESNDASFTLNDKEDAIEEILGTLTPDECEWIAHIRRLFDWAIMKHALKDGRTISESKVKLYEQHHHDLTQLKYFVKTYLAKEYDDIFRNVDSETTKNYVAYSYHVKEVKGTLPKNKATQEEFCKYVLGKVKNIECSEADKVDFDEMIQRLTDNSFMPKQVSGENRVIPYQLYYYELKTILNKAASYLPFLTQCGKDAISNQDKLLSIMTFRIPYFVGPLRKDNSEHAWLERKAGKIYPWNFNDKVDLDKSEEAFIRRMTNTCTYYPGEDVLPLDSLIYEKFMILNEINNIRIDGYPISVDVKQQVFGLFEKKRRVTVKDIQNLLLSLGALDKHGKLTGIDTTIHSNYNTYHHFKSLMERGVLTRDDVERIVERMTYSDDTKRVRLWLNNNYGTLTADDVKHISRLRKHDFGRLSKMFLTGLKGVHKETGERASILDFMWNTNDNLMQLLSECYTFSDEITKLQEAYYAKAQLSLNDFLDSMYISNAVKRPIYRTLAVVNDIRKACGTAPKRIFIEMARDGESKKKRSVTRREQIKNLYRSIRKDFQQEVDFLEKILENKSDGQLQSDALYLYFAQLGRDMYTGDPIKLEHIKDQSFYNIDHIYPQSMVKDDSLDNKVLVQSEINGEKSSRYPLDAAIRNKMKPLWDAYYNHGLISLKKYQRLTRSTPFTDDEKWDFINRQLVETRQSTKALAILLKRKFPDTEIVYSKAGLSSDFRHEFGLVKSRNINDLHHAKDAFLAIVTGNVYHERFNRRWFMVNQPYSVKTKTLFTHSIKNGNFVAWNGEEDLGRIVKMLKQNKNTIHFTRFSFDRKEGLFDIQPLKASTGLVPRKAGLDVVKYGGYDKSTAAYYLLVRFTLEDKKTQHKLMMIPVEGLYKARIDHDKEFLTDYAQTTISEILQKDKQKVINIMFPMGTRHIKLNSMISIDGFYLSIGGKSSKGKSVLCHAMVPLIVPHKIECYIKAMESFARKFKENNKLRIVEKFDKITVEDNLNLYELFLQKLQHNPYNKFFSTQFDVLTNGRSTFTKLSPEEQVQTLLNILSIFKTCRSSGCDLKSINGSAQAARIMISADLTGLSKKYSDIRLVEQSASGLFVSKSQNLLEYL

SEQ ID NO: 23 - protein, 1356 aa, Lactobacillus farciminis
MTKKEQPYNIGLDIGTSSVGWAVTNDNYDLLNIKKKNLWGVRLFEEAQTAKETRLNRSTRRRYRRRKNRINWLNEIFSEELAKTDPSFLIRLQNSWVSKKDPDRKRDKYNLFIDGPYTDKEYYREFPTIFHLRKELILNKDKADIRLIYLALHNILKYRGNFTYEHQKFNISNLNNNLSKELIELNQQLIKYDISFPDDCDWNHISDILIGRGNATQKSSNILKDFTLDKETKKLLKEVINLILGNVAHLNTIFKTSLTKDEEKLNFSGKDIESKLDDLDSILDDDQFTVLDAANRIYSTITLNEILNGESYFSMAKVNQYENHAIDLCKLRDMWHTTKNEEAVEQSRQAYDDYINKPKYGTKELYTSLKKFLKVALPTNLAKEAEEKISKGTYLVKPRNSENGVVPYQLNKIEMEKIIDNQSQYYPFLKENKEKLLSILSFRIPYYVGPLQSAEKNPFAWMERKSNGHARPWNFDEIVDREKSSNKFIRRMTVTDSYLVGEPVLPKNSLIYQRYEVLNELNNIRITENLKTNPIGSRLTVETKQRIYNELFKKYKKVTVKKLTKWLIAQGYYKNPILIGLSQKDEFNSTLTTYLDMKKIFGSSFMEDNKNYDQIEELIEWLTIFEDKQILNEKLHSSKYSYTPDQIKKISNMRYKGWGRLSKKILMDITTETNTPQLLQLSNYSILDLMWATNNNFISIMSNDKYDFKNYIENHNLNKNEDQNISDLVNDIHVSPALKRGITQSIKIVQEIVKFMGHAPKHIFIEVTRETKKSEITTSREKRIKRLQSKLLNKANDFKPQLREYLVPNKKIQEELKKHKNDLSSERIMLYFLQNGKSLYSEESLNINKLSDYQVDHILPRTYIPDDSLENKALVLAKENQRKADDLLLNSNVIDRNLERWTYMLNNNMIGLKKFKNLTRRVITDKDKLGFIHRQLVQTSQMVKGVANILDNMYKNQGTTCIQARANLSTAFRKALSGQDDTYHFKHPELVKNRNVNDFHHAQDAYLASFLGTYRLRRFPTNEMLLMNGEYNKFYGQVKELYSKKKKLPDSRKNGFIISPLVNGTTQYDRNTGEIIWNVGFRDKILKIFNYHQCNVTRKTEIKTGQFYDQTIYSPKNPKYKKLIAQKKDMDPNIYGGFSGDNKSSITIVKIDNNKIKPVAIPIRLINDLKDKKTLQNWLEENVKHKKSIQIIKNNVPIGQIIYSKKVGLLSLNSDREVANRQQLILPPEHSALLRLLQIPDEDLDQILAFYDKNILVEILQELITKMKKFYPFYKGEREFLIANIENFNQATTSEKVNSLEELITLLHANSTSAHLIFNNIEKKAFGRKTHGLTLNNTDFIYQSVTGLYETRIHIE

SEQ ID NO: 24 - protein, 1314 aa, Mycoplasma synoviae
MLRLYCANNLVLNNVQNLWKYLLLLIFDKKIIFLFKIKVILIRRYMENNNKEKIVIGFDLGVASVGWSIVNAETKEVIDLGVRLFSEPEKADYRRAKRTTRRLLRRKKFKREKFHKLILKNAEIFGLQSRNEILNVYKDQSSKYRNILKLKINALKEEIKPSELVWILRDYLQNRGYFYKNEKLTDEFVSNSFPSKKLHEHYEKYGFFRGSVKLDNKLDNKKDKAKEKDEEEESDAKKESEELIFSNKQWINEIVKVFENQSYLTESFKEEYLKLFNYVRPFNKGPGSKNSRTAYGVFSTDIDPETNKFKDYSNIWDKTIGKCSLFEEEIRAPKNLPSALIFNLQNEICTIKNEFTEFKNWWLNAEQKSEILKFVFTELFNWKDKKYSDKKFNKNLQDKIKKYLLNFALENFNLNEEILKNRDLENDTVLGLKGVKYYEKSNATADAALEFSSLKPLYVFIKFLKEKKLDLNYLLGLENTEILYFLDSIYLAISYSSDLKERNEWFKKLLKELYPKIKNNNLEIIENVEDIFEITDQEKFESFSKTHSLSREAFNHIIPLLLSNNEGKNYESLKHSNEELKKRTEKAELKAQQNQKYLKDNFLKEALVPLSVKTSVLQAIKIFNQIIKNFGKKYEISQVVIEMARELTKPNLEKLLNNATNSNIKILKEKLDQTEKFDDFTKKKFIDKIENSVVFRNKLFLWFEQDRKDPYTQLDIKINEIEDETEIDHVIPYSKSADDSWFNKLLVKKSTNQLKKNKTVWEYYQNESDPEAKWNKFVAWAKRIYLVQKSDKESKDNSEKNSIFKNKKPNLKFKNITKKLFDPYKDLGFLARNLNDTRYATKVFRDQLNNYSKHHSKDDENKLFKVVCMNGSITSFLRKSMWRKNEEQVYRFNFWKKDRDQFFHHAVDASIIAIFSLLTKTLYNKLRVYESYDVQRREDGVYLINKETGEVKKADKDYWKDQHNFLKIRENAIEIKNVLNNVDFQNQVRYSRKANTKLNTQLFNETLYGVKEFENNFYKLEKVNLFSRKDLRKFILEDLNEESEKNKKNENGSRKRILTEKYIVDEILQILENEEFKDSKSDINALNKYMDSLPSKFSEFFSQDFINKCKKENSLILTFDAIKHNDPKKVIKIKNLKFFREDATLKNKQAVHKDSKNQIKSFYESYKCVGFIWLKNKNDLEESIFVPINSRVIHFGDKDKDIFDFDSYNKEKLLNEINLKRPENKKFNSINEIEFVKFVKPGALLLNFENQQIYYISTLESSSLRAKIKLLNKMDKGKAVSMKKITNPDEYKIIEHVNPLGINLNWTKKLENNN

SEQ ID NO: 25 - protein, 1096 aa, Eubacterium dolichum
MMEVFMGRLVLGLDIGITSVGFGIIDLDESEIVDYGVRLFKEGTAAENETRRTKRGGRRLKRRRVTRREDMLHLLKQAGIISTSFHPLNNPYDVRVKGLNERLNGEELATALLHLCKHRGSSVETIEDDEAKAKEAGETKKVLSMNDQLLKSGKYVCEIQKERLRTNGHIRGHENNFKTRAYVDEAFQILSHQDLSNELKSAIITIISRKRMYYDGPGGPLSPTPYGRYTYFGQKEPIDLIEKMRGKCSLFPNEPRAPKLAYSAELFNLLNDLNNLSIEGEKLTSEQKAMILKIVHEKGKITPKQLAKEVGVSLEQIRGFRIDTKGSPLLSELTGYKMIREVLEKSNDEHLEDHVFYDEIAEILTKTKDIEGRKKQISELSSDLNEESVHQLAGLTKFTAYHSLSFKALRLINEEMLKTELNQMQSITLFGLKQNNELSVKGMKNIQADDTAILSPVAKRAQRETFKVVNRLREIYGEFDSIVVEMAREKNSEEQRKAIRERQKFFEMRNKQVADIIGDDRKINAKLREKLVLYQEQDGKTAYSLEPIDLKLLIDDPNAYEVDHIIPISISLDDSITNKVLVTHRENQEKGNLTPISAFVKGRFTKGSLAQYKAYCLKLKEKNIKTNKGYRKKVEQYLLNENDIYKYDIQKEFINRNLVDTSYASRVVLNTLTTYFKQNEIPTKVFTVKGSLTNAFRRKINLKKDRDEDYGHHAIDALIIASMPKMRLLSTIFSRYKIEDIYDESTGEVFSSGDDSMYYDDRYFAFIASLKAIKVRKFSHKIDTKPNRSVADETIYSTRVIDGKEKVVKKYKDIYDPKFTALAEDILNNAYQEKYLMALHDPQTFDQIVKVVNYYFEEMSKSEKYFTKDKKGRIKISGMNPLSLYRDEHGMLKKYSKKGDGPAITQMKYFDGVLGNHIDISAHYQVRDKKVVLQQISPYRTDFYYSKENGYKFVTIRYKDVRWSEKKKKYVIDQQDYAMKKAEKKIDDTYEFQFSMHRDELIGITKAEGEALIYPDETWHNFNFFFHAGETPEILKFTATNNDKSNKIEVKPIHCYCKMRLMPTISKKIVRIDKYATDVVGNLYKVKKNTLKFEFD

SEQ ID NO: 26 - protein, 1114 aa, Eubacterium rectale
MNYTEKEKLFMKYILALDIGIASVGWAILDKESETVIEAGSNIFPEASAADNQLRRDMRGAKRNNRRLKTRINDFIKLWENNNLSIPQFKSTEIVGLKVRAITEEITLDELYLILYSYLKHRGISYLEDALDDTVSGSSAYANGLKLNAKELETHYPCEIQQERLNTIGKYRGQSQIINENGEVLDLSNVFTIGAYRKEIQRVFEIQKKYHPELTDEFCDGYMLIFNRKRKYYEGPGNEKSRTDYGRFTTKLDANGNYITEDNIFEKLIGKCSVYPDELRAAAASYTAQEYNVLNDLNNLTINGRKLEENEKHEIVERIKSSNTINMRKIISDCMGENIDDFAGARIDKSGKEIFHKFEVYNKMRKALLEIGIDISNYSREELDEIGYIMTINTDKEAMMEAFQKSWIDLSDDVKQCLINMRKTNGALFNKWQSFSLKIMNELIPEMYAQPKEQMTLLTEMGVTKGTQEEFAGLKYIPVDVVSEDIFNPVVRRSVRISFKILNAVLKKYKALDTIVIEMPRDRNSEEQKKRINDSQKLNEKEMEYIEKKLAVTYGIKLSPSDFSSQKQLSLKLKLWNEQDGICLYSGKTIDPNDIINNPQLFEIDHIIPRSISFDDARSNKVLVYRSENQKKGNQTPYYYLTHSHSEWSFEQYKATVMNLSKKKEYAISRKKIQNLLYSEDITKMDVLKGFINRNINDTSYASRLVLNTIQNFFMANEADTKVKVIKGSYTHQMRCNLKLDKNRDESYSHHAVDAMLIGYSELGYEAYHKLQGEFIDFETGEILRKDMWDENMSDEVYADYLYGKKWANIRNEVVKAEKNVKYWHYVMRKSNRGLCNQTIRGTREYDGKQYKINKLDIRTKEGIKVFAKLAFSKKDSDRERLLVYLNDRRTFDDLCKIYEDYSDAANPFVQYEKETGDIIRKYSKKHNGPRIDKLKYKDGEVGACIDISHKYGFEKGSKKVILESLVPYRMDVYYKEENHSYYLVGVKQSDIKFEKGRNVIDEEAYARILVNEKMIQPGQSRADLENLGFKFKLSFYKNDIIEYEKDGKIYTERLVSRTMPKQRNYIETKPIDKAKFEKQNLVGLGKTKFIKKYRYDILGNKYSCSEEKFTSFC

SEQ ID NO: 27 - protein, 1054 aa, Staphylococcus lugdunensis
MNQKFILGLDIGITSVGYGLIDYETKNIIDAGVRLFPEANVENNEGRRSKRGSRRLKRRRIHRLERVKKLLEDYNLLDQSQIPQSTNPYAIRVKGLSEALSKDELVIALLHIAKRRGIHKIDVIDSNDDVGNELSTKEQLNKNSKLLKDKFVCQIQLERMNEGQVRGEKNRFKTADIIKEIIQLLNVQKNFHQLDENFINKYIELVEMRREYFEGPGKGSPYGWEGDPKAWYETLMGHCTYFPDELRSVKYAYSADLFNALNDLNNLVIQRDGLSKLEYHEKYHIIENVFKQKKKPTLKQIANEINVNPEDIKGYRITKSGKPQFTEFKLYHDLKSVLFDQSILENEDVLDQIAEILTIYQDKDSIKSKLTELDILLNEEDKENIAQLTGYTGTHRLSLKCIRLVLEEQWYSSRNQMEIFTHLNIKPKKINLTAANKIPKAMIDEFILSPVVKRTFGQAINLINKIIEKYGVPEDIIIELARENNSKDKQKFINEMQKKNENTRKRINEIIGKYGNQNAKRLVEKIRLHDEQEGKCLYSLESIPLEDLLNNPNHYEVDHIIPRSVSFDNSYHNKVLVKQSENSKKSNLTPYQYFNSGKSKLSYNQFKQHILNLSKSQDRISKKKKEYLLEERDINKFEVQKEFINRNLVDTRYATRELTNYLKAYFSANNMNVKVKTINGSFTDYLRKVWKFKKERNHGYKHHAEDALIIANADFLFKENKKLKAVNSVLEKPEIESKQLDIQVDSEDNYSEMFIIPKQVQDIKDFRNFKYSHRVDKKPNRQLINDTLYSTRKKDNSTYIVQTIKDIYAKDNTTLKKQFDKSPEKFLMYQHDPRTFEKLEVIMKQYANEKNPLAKYHEETGEYLTKYSKKNNGPIVKSLKYIGNKLGSHLDVTHQFKSSTKKLVKLSIKPYRFDVYLTDKGYKFITISYLDVLKKDNYYYIPEQKYDKLKLGKAIDKNAKFIASFYKNDLIKLDGEIYKIIGVNSDTRNMIELDLPDIRYKEYCELNNIKGEPRIKKTIGKKVNSIEKLTTDVLGNVFTNTQYTKPQLLFKRGN

SEQ ID NO: 28 - protein, 1365 aa, Filifactor alocis
MTKEYYLGLDVGTNSVGWAVTDSQYNLCKFKKKDMWGIRLFESANTAKDRRLQRGNRRRLERKKQRIDLLQEIFSPEICKIDPTFFIRLNESRLHLEDKSNDFKYPLFIEKDYSDIEYYKEFPTIFHLRKHLIESEEKQDIRLIYLALHNIIKTRGHFLIDGDLQSAKQLRPILDTFLLSLQEEQNLSVSLSENQKDEYEEILKNRSIAKSEKVKKLKNLFEISDELEKEEKKAQSAVIENFCKFIVGNKGDVCKFLRVSKEELEIDSFSFSEGKYEDDIVKNLEEKVPEKVYLFEQMKAMYDWNILVDILETEEYISFAKVKQYEKHKTNLRLLRDIILKYCTKDEYNRMFNDEKEAGSYTAYVGKLKKNNKKYWIEKKRNPEEFYKSLGKLLDKIEPLKEDLEVLTMMIEECKNHTLLPIQKNKDNGVIPHQVHEVELKKILENAKKYYSFLTETDKDGYSVVQKIESIFRFRIPYYVGPLSTRHQEKGSNVWMVRKPGREDRIYPWNMEEIIDFEKSNENFITRMTNKCTYLIGEDVLPKHSLLYSKYMVLNELNNVKVRGKKLPTSLKQKVFEDLFENKSKVTGKNLLEYLQIQDKDIQIDDLSGFDKDFKTSLKSYLDFKKQIFGEEIEKESIQNMIEDIIKWITIYGNDKEMLKRVIRANYSNQLTEEQMKKITGFQYSGWGNFSKMFLKGISGSDVSTGETFDIITAMWETDNNLMQILSKKFTFMDNVEDFNSGKVGKIDKITYDSTVKEMFLSPENKRAVWQTIQVAEEIKKVMGCEPKKIFIEMARGGEKVKKRTKSRKAQLLELYAACEEDCRELIKEIEDRDERDFNSMKLFLYYTQFGKCMYSGDDIDINELIRGNSKWDRDHIYPQSKIKDDSIDNLVLVNKTYNAKKSNELLSEDIQKKMHSFWLSLLNKKLITKSKYDRLTRKGDFTDEELSGFIARQLVETRQSTKAIADIFKQIYSSEVVYVKSSLVSDFRKKPLNYLKSRRVNDYHHAKDAYLNIVVGNVYNKKFTSNPIQWMKKNRDTNYSLNKVFEHDVVINGEVIWEKCTYHEDTNTYDGGTLDRIRKIVERDNILYTEYAYCEKGELFNATIQNKNGNSTVSLKKGLDVKKYGGYFSANTSYFSLIEFEDKKGDRARHIIGVPIYIANMLEHSPSAFLEYCEQKGYQNVRILVEKIKKNSLLIINGYPLRIRGENEVDTSFKRAIQLKLDQKNYELVRNIEKFLEKYVEKKGNYPIDENRDHITHEKMNQLYEVLLSKMKKFNKKGMADPSDRIEKSKPKFIKLEDLIDKINVINKMLNLLRCDNDTKADLSLIELPKNAGSFVVKKNTIGKSKIILVNQSVTGLYENRREL

SEQ ID NO: 29 - protein, 1333 aa, Planococcus antarcticus
MKNYTIGLDIGVASVGWVCIDENYKILNYNNRHAFGVHEFESAESAAGRRLKRGMRRRYNRRKKRLQLLQSLFDSYITDSGFFSKTDSQHFWKNNNEFENRSLTEVLSSLRISSRKYPTIYHLRSDLIESNKKMDLRLVYLALHNLVKYRGHFLQEGNWSEAASAEGMDDQLLELVTRYAELENLSPLDLSESQWKAAETLLLNRNLTKTDQSKELTAMFGKEYEPFCKLVAGLGVSLHQLFPSSEQALAYKETKTKVQLSNENVEEVMELLLEEESALLEAVQPFYQQVVLYELLKGETYVAKAKVSAFKQYQKDMASLKNLLDKTFGEKVYRSYFISDKNSQREYQKSHKVEVLCKLDQFNKEAKFAETFYKDLKKLLEDKSKTSIGTTEKDEMLRIIKAIDSNQFLQKQKGIQNAAIPHQNSLYEAEKILRNQQAHYPFITTEWIEKVKQILAFRIPYYIGPLVKDTTQSPFSWVERKGDAPITPWNFDEQIDKAASAEAFISRMRKTCTYLKGQEVLPKSSLTYERFEVLNELNGIQLRTTGAESDFRHRLSYEMKCWIIDNVFKQYKTVSTKRLLQELKKSPYADELYDEHTGEIKEVFGTQKENAFATSLSGYISMKSILGAVVDDNPAMTEELIYWIAVFEDREILHLKIQEKYPSITDVQRQKLALVKLPGWGRFSRLLIDGLPLDEQGQSVLDHMEQYSSVFMEVLKNKGFGLEKKIQKMNQHQVDGTKKIRYEDIEELAGSPALKRGIWRSVKIVEELVSIFGEPANIVLEVAREDGEKKRTKSRKDQWEELTKTTLKNDPDLKSFIGEIKSQGDQRFNEQRFWLYVTQQGKCLYTGKALDIQNLSMYEVDHILPQNFVKDDSLDNLALVMPEANQRKNQVGQNKMPLEIIEANQQYAMRTLWERLHELKLISSGKLGRLKKPSFDEVDKDKFIARQLVETRQIIKHVRDLLDERFSKSDIHLVKAGIVSKFRRFSEIPKIRDYNNKHHAMDALFAAALIQSILGKYGKNFLAFDLSKKDRQKQWRSVKGSNKEFFLFKNFGNLRLQSPVTGEEVSGVEYMKHVYFELPWQTTKMTQTGDGMFYKESIFSPKVKQAKYVSPKTEKFVHDEVKNHSICLVEFTFMKKEKEVQETKFIDLKVIEHHQFLKEPESQLAKFLAEKETNSPIIHARIIRTIPKYQKIWIEHFPYYFISTRELHNARQFEISYELMEKVKQLSERSSVEELKIVFGLLIDQMNDNYPIYTKSSIQDRVQKFVDTQLYDFKSFEIGFEELKKAVAANAQRSDTFGSRISKKPKPEEVAIGYESITGLKYRKPRSVVGTKR

SEQ ID NO: 30 - protein, 1329 aa, Catenibacterium mitsuokai
IVDYCIGLDLGTGSVGWAVVDMNHRLMKRNGKHLWGSRLFSNAETAANRRASRSIRRRYNKRRERIRLLRAILQDMVLEKDPTFFIRLEHTSFLDEEDKAKYLGTDYKDNYNLFIDEDFNDYTYYHKYPTIYHLRKALCESTEKADPRLIYLALHHIVKYRGNFLYEGQKFNMDASNIEDKLSDIFTQFTSFNNIPYEDDEKKNLEILEILKKPLSKKAKVDEVMTLIAPEKDYKSAFKELVTGIAGNKMNVTKMILCEPIKQGDSEIKLKFSDSNYDDQFSEVEKDLGEYVEFVDALHNVYSWVELQTIMGATHTDNASISEAMVSRYNKHHDDLKLLKDCIKNNVPNKYFDMFRNDSEKSKGYYNYINRPSKAPVDEFYKYVKKCIEKVDTPEAKQILNDIELENFLLKQNSRTNGSVPYQMQLDEMIKIIDNQAEYYPILKEKREQLLSILTFRIPYYFGPLNETSEHAWIKRLEGKENQRILPWNYQDIVDVDATAEGFIKRMRSYCTYFPDEEVLPKNSLIVSKYEVYNELNKIRVDDKLLEVDVKNDIYNELFMKNKTVTEKKLKNWLVNNQCCSKDAEIKGFQKENQFSTSLTPWIDFTNIFGKIDQSNFDLIENIIYDLTVFEDKKIMKRRLKKKYALPDDKVKQILKLKYKDWSRLSKKLLDGIVADNRFGSSVTVLDVLEMSRLNLMEIINDKDLGYAQMIEEATSCPEDGKFTYEEVERLAGSPALKRGIWQSLQIVEEITKVMKCRPKYIYIEFERSEEAKERTESKIKKLENVYKDLDEQTKKEYKSVLEELKGFDNTKKISSDSLFLYFTQLGKCMYSGKKLDIDSLDKYQIDHIVPQSLVKDDSFDNRVLVVPSENQRKLDDLVVPFDIRDKMYRFWKLLFDHELISPKKFYSLIKTEYTERDEERFINRQLVETRQITKNVTQIIEDHYSTTKVAAIRANLSHEFRVKNHIYKNRDINDYHHAHDAYIVALIGGFMRDRYPNMHDSKAVYSEYMKMFRKNKNDQKRWKDGFVINSMNYPYEVDGKLIWNPDLINEIKKCFYYKDCYCTTKLDQKSGQLFNLTVLSNDAHADKGVTKAVVPVNKNRSDVHKYGGFSGLQYTIVAIEGQKKKGKKTELVKKISGVPLHLKAASINEKINYIEEKEGLSDVRIIKDNIPVNQMIEMDGGEYLLTSPTEYVNARQLVLNEKQCALIADIYNAIYKQDYDNLDDILMIQLYIELTNKMKVLYPAYRGIAEKFESMNENYVVISKEEKANIIKQMLIVMHRGPQNGNIVYDDFKISDRIGRLKTKNHNLNNIVFISQSPTGIYTKKYKL

SEQ ID NO: 31 - protein, 1327 aa, Solobacterium moorei
MEGQMKNNGNNLQQGNYYLGLDVGTSSVGWAVTDTDYNVLKFRGKSMWGARLFDEASTAEERRTHRGNRRRLARRKYRLLLLEQLFEKEIRKIDDNFFVRLHESNLWADDKSKPSKFLLFNDTNFTDKDYLKKYPTIYHLRSDLIHNSTEHDIRLVFLALHHLIKYRGHFIYDNSANGDVKTLDEAVSDFEEYLNENDIEFNIENKKEFINVLSDKHLTKKEKKISLKKLYGDITDSENINISVLIEMLSGSSISLSNLFKDIEFDGKQNLSLDSDIEETLNDVVDILGDNIDLLIHAKEVYDIAVLTSSLGKHKYLCDAKVELFEKNKKDLMILKKYIKKNHPEDYKKIFSSPTEKKNYAAYSQTNSKNVCSQEEFCLFIKPYIRDMVKSENEDEVRIAKEVEDKSFLTKLKGTNNSVVPYQIHERELNQILKNIVAYLPFMNDEQEDISVVDKIKLIFKFKIPYYVGPLNTKSTRSWVYRSDEKIYPWNFSNVIDLDKTAHEFMNRLIGRCTYTNDPVLPMDSLLYSKYNVLNEINPIKVNGKAIPVEVKQAIYTDLFENSKKKVTRKSIYIYLLKNGYIEKEDIVSGIDIEIKSKLKSHHDFTQIVQENKCTPEEIERIIKGILVYSDDKSMLRRWLKNNIKGLSENDVKYLAKLNYKEWGRLSKTLLTDIYTINPEDGEACSILDIMWNTNATLMEILSNEKYQFKQNIENYKAENYDEKQNLHEELDDMYISPAARRSIWQALRIVDEIVDIKKSAPKKIFIEMAREKKSAMKKKRTESRKDTLLELYKSCKSQADGFYDEELFEKLSNESNSRLRRDQLYLYYTQMGRSMYTGKRIDFDKLINDKNTYDIDHIYPRSKIKDDSITNRVLVEKDINGEKTDIYPISEDIRQKMQPFWKILKEKGLINEEKYKRLTRNYELTDEELSSFVARQLVETQQSTKALATLLKKEYPSAKIVYSKAGNVSEFRNRKDKELPKFREINDLHHAKDAYLNIVVGNVYDTKFTEKFFNNIRNENYSLKRVFDFSVPGAWDAKGSTFNTIKKYMAKNNPIIAFAPYEVKGELFDQQIVPKGKGQFPIKQGKDIEKYGGYNKLSSAFLFAVEYKGKKARERSLETVYIKDVELYLQDPIKYCESVLGLKEPQIIKPKILMGSLFSINNKKLVVTGRSGKQYVCHHIYQLSINDEDSQYLKNIAKYLQEEPDGNIERQNILNITSVNNIKLFDVLCTKFNSNTYEIILNSLKNDVNEGREKFSELDILEQCNILLQLLKAFKCNRESSNLEKLNNKKQAGVIVIPHLFTKCSVFKVIHQSITGLFEKEMDLLK

SEQ ID NO: 32 - protein, 1323 aa, Fructobacillus fructosus
MVYDVGLDIGTGSVGWVALDENGKLARAKGKNLVGVRLFDTAQTAADRRGFRTTRRRLSRRKWRLRLLDELFSAEINEIDSSFFQRLKYSYVHPKDEENKAHYYGGYLFPTEEETKKFHRSYPTIYHLRQELMAQPNKRFDIREIYLAIHHLVKYRGHFLSSQEKITIGSTYNPEDLANAIEVYADEKGLSWELNNPEQLTEIISGEAGYGLNKSMKADEALKLFEFDNNQDKVAIKTLLAGLTGNQIDFAKLFGKDISDKDEAKLWKLKLDDEALEEKSQTILSQLTDEEIELFHAVVQAYDGFVLIGLLNGADSVSAAMVQLYDQHREDRKLLKSLAQKAGLKHKRFSEIYEQLALATDEATIKNGISTARELVEESNLSKEVKEDTLRRLDENEFLPKQRTKANSVIPHQLHLAELQKILQNQGQYYPFLLDTFEKEDGQDNKIEELLRFRIPYYVGPLVTKKDVEHAGGDADNHWVERNEGFEKSRVTPWNFDKVFNRDKAARDFIERLTGNDTYLIGEKTLPQNSLRYQLFTVLNELNNVRVNGKKFDSKTKADLINDLFKARKTVSLSALKDYLKAQGKGDVTITGLADESKFNSSLSSYNDLKKTFDAEYLENEDNQETLEKIIEIQTVFEDSKIASRELSKLPLDDDQVKKLSQTHYTGWGRLSEKLLDSKIIDERGQKVSILDKLKSTSQNFMSIINNDKYGVQAWITEQNTGSSKLTFDEKVNELTTSPANKRGIKQSFAVLNDIKKAMKEEPRRVYLEFAREDQTSVRSVPRYNQLKEKYQSKSLSEEAKVLKKTLDGNKNKMSDDRYFLYFQQQGKDMYTGRPINFERLSQDYDIDHIIPQAFTKDDSLDNRVLVSRPENARKSDSFAYTDEVQKQDGSLWTSLLKSGFINRKKYERLTKAGKYLDGQKTGFIARQLVETRQIIKNVASLIEGEYENSKAVAIRSEITADMRLLVGIKKHREINSFHHAFDALLITAAGQYMQNRYPDRDSTNVYNEFDRYTNDYLKNLRQLSSRDEVRRLKSFGFVVGTMRKGNEDWSEENTSYLRKVMMFKNILTTKKTEKDRGPLNKETIFSPKSGKKLIPLNSKRSDTALYGGYSNVYSAYMTLVRANGKNLLIKIPISIANQIEVGNLKINDYIVNNPAIKKFEKILISKLPLGQLVNEDGNLIYLASNEYRHNAKQLWLSTTDADKIASISENSSDEELLEAYDILTSENVKNRFPFFKKDIDKLSQVRDEFLDSDKRIAVIQTILRGLQIDAAYQAPVKIISKKVSDWHKLQQSGGIKLSDNSEMIYQSATGIFETRVKISDLL

SEQ ID NO: 33 - protein, 1265 aa, Mycoplasma ovipneumoniae
MHNKKNITIGFDLGIASIGWAIIDSTTSKILDWGTRTFEERKTANERRAFRSTRRNIRRKAYRNQRFINLILKYKDLFELKNISDIQRANKKDTENYEKIISFFTEIYKKCAAKHSNILEVKVKALDSKIEKLDLIWILHDYLENRGFFYDLEEENVADKYEGIEHPSILLYDFFKKNGFFKSNSSIPKDLGGYSFSNLQWVNEIKKLFEVQEINPEFSEKFLNLFTSVRDYAKGPGSEHSASEYGIFQKDEKGKVFKKYDNIWDKTIGKCSFFVEENRSPVNYPSYEIFNLLNQLINLSTDLKTTNKKIWQLSSNDRNELLDELLKVKEKAKIISISLKKNEIKKIILKDFGFEKSDIDDQDTIEGRKIIKEEPTTKLEVTKHLLATIYSHSSDSNWININNILEFLPYLDAICIILDREKSRGQDEVLKKLTEKNIFEVLKIDREKQLDFVKSIFSNTKFNFKKIGNFSLKAIREFLPKMFEQNKNSEYLKWKDEEIRRKWEEQKSKLGKTDKKTKYLNPRIFQDEIISPGTKNTFEQAVLVLNQIIKKYSKENIIDAIIIESPREKNDKKTIEEIKKRNKKGKGKTLEKLFQILNLENKGYKLSDLETKPAKLLDRLRFYHQQDGIDLYTLDKINIDQLINGSQKYEIEHIIPYSMSYDNSQANKILTEKAENLKKGKLIASEYIKRNGDEFYNKYYEKAKELFINKYKKNKKLDSYVDLDEDSAKNRFRFLTLQDYDEFQVEFLARNLNDTRYSTKLFYHALVEHFENNEFFTYIDENSSKHKVKISTIKGHVTKYFRAKPVQKNNGPNENLNNNKPEKIEKNRENNEHHAVDAAIVAIIGNKNPQIANLLTLADNKTDKKFLLHDENYKENIETGELVKIPKFEVDKLAKVEDLKKIIQEKYEEAKKHTAIKFSRKTRTILNGGLSDETLYGFKYDEKEDKYFKIIKKKLVTSKNEELKKYFENPFGKKADGKSEYTVLMAQSHLSEFNKLKEIFEKYNGFSNKTGNAFVEYMNDLALKEPTLKAEIESAKSVEKLLYYNFKPSDQFTYHDNINNKSFKRFYKNIRIIEYKSIPIKFKILSKHDGGKSFKDTLFSLYSLVYKVYENGKESYKSIPVTSQMRNFGIDEFDFLDENLYNKEKLDIYKSDFAKPIPVNCKPVFVLKKGSILKKKSLDIDDFKETKETEEGNYYFISTISKRFNRDTAYGLKPLKLSVVKPVAEPSTNPIFKEYIPIHLDELGNEYPVKIKEHTDDEKLMCTIK

SEQ ID NO: 34 - protein, 1236 aa, Mycoplasma mobile
MYFYKNKENKLNKKVVLGLDLGIASVGWCLTDISQKEDNKFPIILHGVRLFETVDDSDDKLLNETRRKKRGQRRRNRRLFTRKRDFIKYLIDNNIIELEFDKNPKILVRNFIEKYINPFSKNLELKYKSVTNLPIGFHNLRKAAINEKYKLDKSELIVLLYFYLSLRGAFFDNPEDTKSKEMNKNEIEIFDKNESIKNAEFPIDKIIEFYKISGKIRSTINLKFGHQDYLKEIKQVFEKQNIDFMNYEKFAMEEKSFFSRIRNYSEGPGNEKSFSKYGLYANENGNPELIINEKGQKIYTKIFKTLWESKIGKCSYDKKLYRAPKNSFSAKVFDITNKLTDWKHKNEYISERLKRKILLSRFLNKDSKSAVEKILKEENIKFENLSEIAYNKDDNKINLPIINAYHSLTTIFKKHLINFENYLISNENDLSKLMSFYKQQSEKLFVPNEKGSYEINQNNNVLHIFDAISNILNKFSTIQDRIRILEGYFEFSNLKKDVKSSEIYSEIAKLREFSGTSSLSFGAYYKFIPNLISEGSKNYSTISYEEKALQNQKNNFSHSNLFEKTWVEDLIASPTVKRSLRQTMNLLKEIFKYSEKNNLEIEKIVVEVTRSSNNKHERKKIEGINKYRKEKYEELKKVYDLPNENTTLLKKLWLLRQQQGYDAYSLRKIEANDVINKPWNYDIDHIVPRSISFDDSFSNLVIVNKLDNAKKSNDLSAKQFIEKIYGIEKLKEAKENWGNWYLRNANGKAFNDKGKFIKLYTIDNLDEFDNSDFINRNLSDTSYITNALVNHLTFSNSKYKYSVVSVNGKQTSNLRNQIAFVGIKNNKETEREWKRPEGFKSINSNDFLIREEGKNDVKDDVLIKDRSFNGHHAEDAYFITIISQYFRSFKRIERLNVNYRKETRELDDLEKNNIKFKEKASFDNFLLINALDELNEKLNQMRFSRMVITKKNTQLFNETLYSGKYDKGKNTIKKVEKLNLLDNRTDKIKKIEEFFDEDKLKENELTKLHIFNHDKNLYETLKIIWNEVKIEIKNKNLNEKNYFKYFVNKKLQEGKISFNEWVPILDNDFKIIRKIRYIKFSSEEKETDEIIFSQSNFLKIDQRQNFSFHNTLYWVQIWVYKNQKDQYCFISIDARNSKFEKDEIKINYEKLKTQKEKLQIINEEPILKINKGDLFENEEKELFYIVGRDEKPQKLEIKYILGKKIKDQKQIQKPVKKYFPNWKKVNLTYMGEIFKK

SEQ ID NO: 35 - protein, 1629 aa, Francisella novicida
MNFKILPIAIDLGVKNTGVFSAFYQKGTSLERLDNKNGKVYELSKDSYTLLMNNRTARRHQRRGIDRKQLVKRLFKLIWTEQLNLEWDKDTQQAISFLFNRRGFSFITDGYSPEYLNIVPEQVKAILMDIFDDYNGEDDLDSYLKLATEQESKISEIYNKLMQKILEFKLMKLCTDIKDDKVSTKTLKEITSYEFELLADYLANYSESLKTQKFSYTDKQGNLKELSYYHHDKYNIQEFLKRHATINDRILDTLLTDDLDIWNFNFEKFDFDKNEEKLQNQEDKDHIQAHLHHFVFAVNKIKSEMASGGRHRSQYFQEITNVLDENNHQEGYLKNFCENLHNKKYSNLSVKNLVNLIGNLSNLELKPLRKYFNDKIHAKADHWDEQKFTETYCHWILGEWRVGVKDQDKKDGAKYSYKDLCNELKQKVTKAGLVDFLLELDPCRTIPPYLDNNNRKPPKCQSLILNPKFLDNQYPNWQQYLQELKKLQSIQNYLDSFETDLKVLKSSKDQPYFVEYKSSNQQIASGQRDYKDLDARILQFIFDRVKASDELLLNEIYFQAKKLKQKASSELEKLESSKKLDEVIANSQLSQILKSQHTNGIFEQGTFLHLVCKYYKQRQRARDSRLYIMPEYRYDKKLHKYNNTGRFDDDNQLLTYCNHKPRQKRYQLLNDLAGVLQVSPNFLKDKIGSDDDLFISKWLVEHIRGFKKACEDSLKIQKDNRGLLNHKINIARNTKGKCEKEIFNLICKIEGSEDKKGNYKHGLAYELGVLLFGEPNEASKPEFDRKIKKFNSIYSFAQIQQIAFAERKGNANTCAVCSADNAHRMQQIKITEPVEDNKDKIILSAKAQRLPAIPTRIVDGAVKKMATILAKNIVDDNWQNIKQVLSAKHQLHIPIITESNAFEFEPALADVKGKSLKDRRKKALERISPENIFKDKNNRIKEFAKGISAYSGANLTDGDFDGAKEELDHIIPRSHKKYGTLNDEANLICVTRGDNKNKGNRIFCLRDLADNYKLKQFETTDDLEIEKKIADTIWDANKKDFKFGNYRSFINLTPQEQKAFRHALFLADENPIKQAVIRAINNRNRTFVNGTQRYFAEVLANNIYLRAKKENLNTDKISFDYFGIPTIGNGRGIAEIRQLYEKVDSDIQAYAKGDKPQASYSHLIDAMLAFCIAADEHRNDGSIGLEIDKNYSLYPLDKNTGEVFTKDIFSQIKITDNEFSDKKLVRKKAIEGFNTHRQMTRDGIYAENYLPILIHKELNEVRKGYTWKNSEEIKIFKGKKYDIQQLNNLVYCLKFVDKPISIDIQISTLEELRNILTTNNIAATAEYYYINLKTQKLHEYYIENYNTALGYKKYSKEMEFLRSLAYRSERVKIKSIDDVKQVLDKDSNFIIGKITLPFKKEWQRLYREWQNTTIKDDYEFLKSFFNVKSITKLHKKVRKDFSLPISTNEGKFLVKRKTWDNNFIYQILNDSDSRADGTKPFIPAFDISKNEIVEAIIDSFTSKNIFWLPKNIELQKVDNKNIFAIDTSKWFEVETPSDLRDIGIATIQYKIDNNSRPKVRVKLDYVIDDDSKINYFMNHSLLKSRYPDKVLEILKQSTIIEFESSGFNKTIKEMLGMKLAGIYNETSNN

SEQ ID NO: 36 - protein, 1428 aa, Parasutterella excrementihominis
MGKTHIIGVGLDLGGTYTGTFITSHPSDEAEHRDHSSAFTVVNSEKLSFSSKSRTAVRHRVRSYKGFDLRRRLLLLVAEYQLLQKKQTLAPEERENLRIALSGYLKRRGYARTEAETDTSVLESLDPSVFSSAPSFTNFFNDSEPLNIQWEAIANSPETTKALNKELSGQKEADFKKYIKTSFPEYSAKEILANYVEGRRAILDASKYIANLQSLGHKHRSKYLSDILQDMKRDSRITRLSEAFGSTDNLWRIIGNISNLQERAVRWYFNDAKFEQGQEQLDAVKLKNVLVRALKYLRSDDKEWSASQKQIIQSLEQSGDVLDVLAGLDPDRTIPPYEDQNNRRPPEDQTLYLNPKALSSEYGEKWKSWANKFAGAYPLLTEDLTEILKNTDRKSRIKIRSDVLPDSDYRLAYILQRAFDRSIALDECSIRRTAEDFENGVVIKNEKLEDVLSGHQLEEFLEFANRYYQETAKAKNGLWFPENALLERADLHPPMKNKILNVIVGQALGVSPAEGTDFIEEIWNSKVKGRSTVRSICNAIENERKTYGPYFSEDYKFVKTALKEGKTEKELSKKFAAVIKVLKMVSEVVPFIGKELRLSDEAQSKFDNLYSLAQLYNLIETERNGFSKVSLAAHLENAWRMTMTDGSAQCCRLPADCVRPFDGFIRKAIDRNSWEVAKRIAEEVKKSVDFTNGTVKIPVAIEANSFNFTASLTDLKYIQLKEQKLKKKLEDIQRNEENQEKRWLSKEERIRADSHGICAYTGRPLDDVGEIDHIIPRSLTLKKSESIYNSEVNLIFVSAQGNQEKKNNIYLLSNLAKNYLAAVFGTSDLSQITNEIESTVLQLKAAGRLGYFDLLSEKERACARHALFLNSDSEARRAVIDVLGSRRKASVNGTQAWFVRSIFSKVRQALAAWTQETGNELIFDAISVPAADSSEMRKRFAEYRPEFRKPKVQPVASHSIDAMCIYLAACSDPFKTKRMGSQLAIYEPINFDNLFTGSCQVIQNTPRNFSDKTNIANSPIFKETIYAERFLDIIVSRGEIFIGYPSNMPFEEKPNRISIGGKDPFSILSVLGAYLDKAPSSEKEKLTIYRVVKNKAFELFSKVAGSKFTAEEDKAAKILEALHFVTVKQDVAATVSDLIKSKKELSKDSIENLAKQKGCLKKVEYSSKEFKFKGSLIIPAAVEWGKVLWNVFKENTAEELKDENALRKALEAAWPSSFGTRNLHSKAKRVFSLPVVATQSGAVRIRRKTAFGDFVYQSQDTNNLYSSFPVKNGKLDWSSPIIHPALQNRNLTAYGYRFVDHDRSISMSEFREVYNKDDLMRIELAQGTSSRRYLRVEMPGEKFLAWFGENSISLGSSFKFSVSEVFDNKIYTENAEFTKFLPKPREDNKHNGTIFFELVGPRVIFNYIVGGAASSLKEIFSEAGKERS

SEQ ID NO: 37 - protein, 1372 aa, Legionella pneumophila
MESSQILSPIGIDLGGKFTGVCLSHLEAFAELPNHANTKYSVILIDHNNFQLSQAQRRATRHRVRNKKRNQFVKRVALQLFQHILSRDLNAKEETALCHYLNNRGYTYVDTDLDEYIKDETTINLLKELLPSESEHNFIDWFLQKMQSSEFRKILVSKVEEKKDDKELKNAVKNIKNFITGFEKNSVEGHRHRKVYFENIKSDITKDNQLDSIKKKIPSVCLSNLLGHLSNLQWKNLHRYLAKNPKQFDEQTFGNEFLRMLKNFRHLKGSQESLAVRNLIQQLEQSQDYISILEKTPPEITIPPYEARTNTGMEKDQSLLLNPEKLNNLYPNWRNLIPGIIDAHPFLEKDLEHTKLRDRKRIISPSKQDEKRDSYILQRYLDLNKKIDKFKIKKQLSFLGQGKQLPANLIETQKEMETHFNSSLVSVLIQIASAYNKEREDAAQGIWFDNAFSLCELSNINPPRKQKILPLLVGAILSEDFINNKDKWAKFKIFWNTHKIGRTSLKSKCKEIEEARKNSGNAFKIDYEEALNHPEHSNNKALIKIIQTIPDIIQAIQSHLGHNDSQALIYHNPFSLSQLYTILETKRDGFHKNCVAVTCENYWRSQKTEIDPEISYASRLPADSVRPFDGVLARMMQRLAYEIAMAKWEQIKHIPDNSSLLIPIYLEQNRFEFEESFKKIKGSSSDKTLEQAIEKQNIQWEEKFQRIINASMNICPYKGASIGGQGEIDHIYPRSLSKKHFGVIFNSEVNLIYCSSQGNREKKEEHYLLEHLSPLYLKHQFGTDNVSDIKNFISQNVANIKKYISFHLLTPEQQKAARHALFLDYDDEAFKTITKFLMSQQKARVNGTQKFLGKQIMEFLSTLADSKQLQLEFSIKQITAEEVHDHRELLSKQEPKLVKSRQQSFPSHAIDATLTMSIGLKEFPQFSQELDNSWFINHLMPDEVHLNPVRSKEKYNKPNISSTPLFKDSLYAERFIPVWVKGETFAIGFSEKDLFEIKPSNKEKLFTLLKTYSTKNPGESLQELQAKSKAKWLYFPINKTLALEFLHHYFHKEIVTPDDTTVCHFINSLRYYTKKESITVKILKEPMPVLSVKFESSKKNVLGSFKHTIALPATKDWERLFNHPNFLALKANPAPNPKEFNEFIRKYFLSDNNPNSDIPNNGHNIKPQKHKAVRKVFSLPVIPGNAGTMMRIRRKDNKGQPLYQLQTIDDTPSMGIQINEDRLVKQEVLMDAYKTRNLSTIDGINNSEGQAYATFDNWLTLPVSTFKPEIIKLEMKPHSKTRRYIRITQSLADFIKTIDEALMIKPSDSIDDPLNMPNEIVCKNKLFGNELKPRDGKMKIVSTGKIVTYEFESDSTPQWIQTLYVTQLKKQP

SEQ ID NO: 38 - protein, 1409 aa, Wolinella succinogenes
MLVSPISVDLGGKNTGFFSFTDSLDNSQSGTVIYDESFVLSQVGRRSKRHSKRNNLRNKLVKRLFLLILQEHHGLSIDVLPDEIRGLFNKRGYTYAGFELDEKKKDALESDTLKEFLSEKLQSIDRDSDVEDFLNQIASNAESFKDYKKGFEAVFASATHSPNKKLELKDELKSEYGENAKELLAGLRVTKEILDEFDKQENQGNLPRAKYFEELGEYIATNEKVKSFFDSNSLKLTDMTKLIGNISNYQLKELRRYFNDKEMEKGDIWIPNKLHKITERFVRSWHPKNDADRQRRAELMKDLKSKEIMELLTTTEPVMTIPPYDDMNNRGAVKCQTLRLNEEYLDKHLPNWRDIAKRLNHGKFNDDLADSTVKGYSEDSTLLHRLLDTSKEIDIYELRGKKPNELLVKTLGQSDANRLYGFAQNYYELIRQKVRAGIWVPVKNKDDSLNLEDNSNMLKRCNHNPPHKKNQIHNLVAGILGVKLDEAKFAEFEKELWSAKVGNKKLSAYCKNIEELRKTHGNTFKIDIEELRKKDPAELSKEEKAKLRLTDDVILNEWSQKIANFFDIDDKHRQRFNNLFSMAQLHTVIDTPRSGFSSTCKRCTAENRFRSETAFYNDETGEFHKKATATCQRLPADTQRPFSGKIERYIDKLGYELAKIKAKELEGMEAKEIKVPIILEQNAFEYEESLRKSKTGSNDRVINSKKDRDGKKLAKAKENAEDRLKDKDKRIKAFSSGICPYCGDTIGDDGEIDHILPRSHTLKIYGTVFNPEGNLIYVHQKCNQAKADSIYKLSDIKAGVSAQWIEEQVANIKGYKTFSVLSAEQQKAFRYALFLQNDNEAYKKVVDWLRTDQSARVNGTQKYLAKKIQEKLTKMLPNKHLSFEFILADATEVSELRRQYARQNPLLAKAEKQAPSSHAIDAVMAFVARYQKVFKDGTPPNADEVAKLAMLDSWNPASNEPLTKGLSTNQKIEKMIKSGDYGQKNMREVFGKSIFGENAIGERYKPIVVQEGGYYIGYPATVKKGYELKNCKVVTSKNDIAKLEKIIKNQDLISLKENQYIKIFSINKQTISELSNRYFNMNYKNLVERDKEIVGLLEFIVENCRYYTKKVDVKFAPKYIHETKYPFYDDWRRFDEAWRYLQENQNKTSSKDRFVIDKSSLNEYYQPDKNEYKLDVDTQPIWDDFCRWYFLDRYKTANDKKSIRIKARKTFSLLAESGVQGKVFRAKRKIPTGYAYQALPMDNNVIAGDYANILLEANSKTLSLVPKSGISIEKQLDKKLDVIKKTDVRGLAIDNNSFFNADFDTHGIRLIVENTSVKVGNFPISAIDKSAKRMIFRALFEKEKGKRKKKTTISFKESGPVQDYLKVFLKKIVKIQLRTDGSISNIVVRKNAADFTLSFRSEHIQKLLK

SEQ ID NO: 39 - protein, 1397 aa, unknown
  Cas9 protein from gamma proteobacterium HTCC5015 species
MTKNYISPIAIDLGAKFTGVALYQYLEGADCTQEVAKGLLVDDRGNVTWSQEGRRGKRHQVRGYKRRKMAKRLLWLILDSEYGIKREEVTEPLLKFINGLLNRRGYTYISEEVDEESMNVSPLPFSEMMPDYFNSSAPLLEQLAKLLSDKNKLVRFRAEGKIPSNKNEFKKLLDTALDGKYKDEKKELSEAWGNILIASENVLKSTVDGHKSRSEYLANIKEDIKSNEELEKQISSKEIDGFYNLVGHLSNFQLRLLRKYFNDPNMSGVSYWDEKRLEKYFYQWVQGWHTKGGTDEAEKKNIILKTKGAPLLKTLKSLSADLTIPPYEDQNNRRPPKCQSVLLSDEKLTMHYPKWKEWVGQLVKQNDNAYLNENVTLANALHRIVERSRSIDPYQLRLLISITDAEKRNDLAGYKRLKLSLGSEVDEFLLLVKNIVDETKEAREGLWFETENKLFFKCGKTPPRKEKLKSTLLSAVLGKNLSDDEQSSFIEEFWKSGTPKIERRNVRGWCRLASQVQKTYGVYLKEYGLQQLHKLEAGKKLDDKPLALLYKNSGLIASKIGEALNIEPDEVSRFASPHSLAQIFNIIEGDVAGFNKTCRACTYENIWRMQEEKVESLLTNQLLSEIHGERKVPLKSAMCTRLSADSTRPFDGQMASIIEHIARKIAQHKIAQINDVPKEFSIDIPIIIESNQFSFTAELEEIKRGRGSAKAKKAKELGEKSKAGWVSKTERIKTSSEGICPYTGAPLGGSGEIDHIIPRSLTGRTKKTVFNSEANLIYCSSKGNHDKGNRVYVIEQLNDKYLKKQFSTSDVNLIKKKIKTTIQRFTEGGEKLRSFSELSREDQKAFRHALFVPELKSEVTSLLAVKNITRVNGTQAWLAKKIASLLAEHLDKQGRDYTLSAHQIDPWSVSKQRKMLASAEPIWAKKDPQPAASHVVDAVCTFLEALEQPHTASRLKTISSTSFEKTGWRSALIPDLIKVDALDRRPKYRRYNIGSTSLFKDGIYAERFLPILIDENGLMAGYDIDNSLKAKGADVVFESLSPFLLFKGEEVGAQSLSDWQERIDGRYLYMSIDKVKAFDYLQEKVGEKDIAAELLNSIHFTQRKTELRAKFSDDSGKKMKTLDAIRKSLKLTVTVNEIGKRKEKCGFSGTIGIPAKSAWENLLDEPLLETYWGTKMPPQEIWEKVYRKHFPRNIPNQAHRKVRKDFSLPVVDSVSGGFRVKRKTPNGYNYQLLAIDGYSAVGFKKEGDNVDFKSPALVPQIAESKSVTPISSELVHLDKNEIVYFDEWRKIDISDSDLKQFVSSLELAPGSQNRFYIRFTVDEDQFERHFKSALRVNGIQDLDTVNKTFDWNREIPSLLIPPRSNLFLLETGQKITFEYIANGANAEVKKAYSLRRA

SEQ ID NO: 40 - protein, 1422 aa, Sutterella wadsworthensis
MTQSERRFSCSIGIDMGAKYTGVFYALFDREELPTNLNSKAMTLVMPETGPRYVQAQRTAVRHRLRGQKRYTLARKLAFLVVDDMIKKQEKRLTDEEWKRGREALSGLLKRRGYSRPNADGEDLTPLENVRADVFAAHPAFSTYFSEVRSLAEQWEEFTANISNVEKFLGDPNIPADKEFIEFAVAEGLIDKTEKKAYQSALSTLRANANVLTGLRQMGHKPRSEYFKAIEADLKKDSRLAKINEAFGGAERLARLLGNLSNLQLRAERWYFNAPDIMKDRGWEPDRFKKTLVRAFKFFHPAKDQNKQHLELIKQIENSEDIIETLCTLDPNRTIPPYEDQNNRRPPLDQTLLLSPEKLTRQYGEIWKTWSARLTSAEPTLAPAAEILERSTDRKSRVAVNGHEPLPTLAYQLSYALQRAFDRSKALDPYALRALAAGSKSNKLTSARTALENCIGGQNVKTFLDCARRYYREADDAKVGLWFDNADGLLERSDLHPPMKKKILPLLVANILQTDETTGQKFLDEIWRKQIKGRETVASRCARIETVRKSFGGGFNIAYNTAQYREVNKLPRNAQDKELLTIRDRVAETADFIAANLGLSDEQKRKFANPFSLAQFYTLIETEVSGFSATTLAVHLENAWRMTIKDAVINGETVRAAQCSRLPAETARPFDGLVRRLVDRQAWEIAKRVSTDIQSKVDFSNGIVDVSIFVEENKFEFSASVADLKKNKRVKDKMLSEAEKLETRWLIKNERIKKASRGTCPYTGDRLAEGGEIDHILPRSLIKDARGIVFNAEPNLIYASSRGNQLKKNQRYSLSDLKANYRNEIFKTSNIAAITAEIEDVVTKLQQTHRLKFFDLLNEHEQDCVRHALFLDDGSEARDAVLELLATQRRTRVNGTQIWMIKNLANKIREELQNWCKTTNNRLHFQAAATNVSDAKNLRLKLAQNQPDFEKPDIQPIASHSIDALCSFAVGSADAERDQNGFDYLDGKTVLGLYPQSCEVIHLQAKPQEEKSHFDSVAIFKEGIYAEQFLPIFTLNEKIWIGYETLNAKGERCGAIEVSGKQPKELLEMLAPFFNKPVGDLSAHATYRILKKPAYEFLAKAALQPLSAEEKRLAALLDALRYCTSRKSLMSLFMAANGKSLKKREDVLKPKLFQLKVELKGEKSFKLNGSLTLPVKQDWLRICDSPELADAFGKPCSADELTSKLARIWKRPVMRDLAHAPVRREFSLPAIDNPSGGFRIRRTNLFGNELYQVHAINAKKYRGFASAGSNVDWSKGILFNELQHENLTECGGRFITSADVTPMSEWRKVVAEDNLSIWIAPGTEGRRYVRVETTFIQASHWFEQSVENWAITSPLSLPASFKVDKPAEFQKAVGTELSELLGQPRSEIFIENVGNAKHIRFWYIVVSSNKKMNESYNNVSKS

SEQ ID NO: 41 - protein, 984 aa, Campylobacter jejuni
MARILAFDIGISSIGWAFSENDELKDCGVRIFTKVENPKTGESLALPRRLARSARKRLARRKARLNHLKHLIANEFKLNYEDYQSFDESLAKAYKGSLISPYELRFRALNELLSKQDFARVILHIAKRRGYDDIKNSDDKEKGAILKAIKQNEEKLANYQSVGEYLYKEYFQKFKENSKEFTNVRNKKESYERCIAQSFLKDELKLIFKKQREFGFSFSKKFEEEVLSVAFYKRALKDFSHLVGNCSFFTDEKRAPKNSPLAFMFVALTRIINLLNNLKNTEGILYTKDDLNALLNEVLKNGTLTYKQTKKLLGLSDDYEFKGEKGTYFIEFKKYKEFIKALGEHNLSQDDLNEIAKDITLIKDEIKLKKALAKYDLNQNQIDSLSKLEFKDHLNISFKALKLVTPLMLEGKKYDEACNELNLKVAINEDKKDFLPAFNETYYKDEVTNPVVLRAIKEYRKVLNALLKKYGKVHKINIELAREVGKNHSQRAKIEKEQNENYKAKKDAELECEKLGLKINSKNILKLRLFKEQKEFCAYSGEKIKISDLQDEKMLEIDHIYPYSRSFDDSYMNKVLVFTKQNQEKLNQTPFEAFGNDSAKWQKIEVLAKNLPTKKQKRILDKNYKDKEQKNFKDRNLNDTRYIARLVLNYTKDYLDFLPLSDDENTKLNDTQKGSKVHVEAKSGMLTSALRHTWGFSAKDRNNHLHHAIDAVIIAYANNSIVKAFSDFKKEQESNSAELYAKKISELDYKNKRKFFEPFSGFRQKVLDKIDEIFVSKPERKKPSGALHEETFRKEEEFYQSYGGKEGVLKALELGKIRKVNGKIVKNGDMFRVDIFKHKKTNKFYAVPIYTMDFALKVLPNKAVARSKKGEIKDWILMDENYEFCFSLYKDSLILIQTKDMQEPEFVYYNAFTSSTVSLIVSKHDNKFETLSKNQKILFKNANEKEVIAKSIGIQNLKVFEKYIVSALGEVTKAEFRQREDFKK

SEQ ID NO: 42 - protein, 1082 aa, Neisseria meningitidis
MAAFKPNPINYILGLDIGIASVGWAMVEIDEDENPICLIDLGVRVFERAEVPKTGDSLAMARRLARSVRRLTRRRAHRLLRARRLLKREGVLQAADFDENGLIKSLPNTPWQLRAAALDRKLTPLEWSAVLLHLIKHRGYLSQRKNEGETADKELGALLKGVADNAHALQTGDFRTPAELALNKFEKESGHIRNQRGDYSHTFSRKDLQAELILLFEKQKEFGNPHVSGGLKEGIETLLMTQRPALSGDAVQKMLGHCTFEPAEPKAAKNTYTAERFIWLTKLNNLRILEQGSERPLTDTERATLMDEPYRKSKLTYAQARKLLGLEDTAFFKGLRYGKDNAEASTLMEMKAYHAISRALEKEGLKDKKSPLNLSPELQDEIGTAFSLFKTDEDITGRLKDRIQPEILEALLKHISFDKFVQISLKALRRIVPLMEQGKRYDEACAEIYGDHYGKKNTEEKIYLPPIPADEIRNPVVLRALSQARKVINGVVRRYGSPARIHIETAREVGKSFKDRKEIEKRQEENRKDREKAAAKFREYFPNFVGEPKSKDILKLRLYEQQHGKCLYSGKEINLGRLNEKGYVEIDHALPFSRTWDDSFNNKVLVLGSENQNKGNQTPYEYFNGKDNSREWQEFKARVETSRFPRSKKQRILLQKFDEDGFKERNLNDTRYVNRFLCQFVADRMRLTGKGKKRVFASNGQITNLLRGFWGLRKVRAENDRHHALDAVVVACSTVAMQQKITRFVRYKEMNAFDGKTIDKETGEVLHQKTHFPQPWEFFAQEVMIRVFGKPDGKPEFEEADTPEKLRTLLAEKLSSRPEAVHEYVTPLFVSRAPNRKMSGQGHMETVKSAKRLDEGVSVLRVPLTQLKLKDLEKMVNREREPKLYEALKARLEAHKDDPAKAFAEPFYKYDKAGNRTQQVKAVRVEQVQKTGVWVRNHNGIADNATMVRVDVFEKGDKYYLVPIYSWQVAKGILPDRAVVQGKDEEDWQLIDDSFNFKFSLHPNDLVEVITKKARMFGYFASCHRGTGNINIRIHDLDHKIGKNGILEGIGVKTALSFQKYQIDELGKEIRPCRLKKRPPVR

SEQ ID NO: 43 - protein, 1056 aa, Pasteurella multocida
MQTTNLSYILGLDLGIASVGWAVVEINENEDPIGLIDVGVRIFERAEVPKTGESLALSRRLARSTRRLIRRRAHRLLLAKRFLKREGILSTIDLEKGLPNQAWELRVAGLERRLSAIEWGAVLLHLIKHRGYLSKRKNESQTNNKELGALLSGVAQNHQLLQSDDYRTPAELALKKFAKEEGHIRNQRGAYTHTFNRLDLLAELNLLFAQQHQFGNPHCKEHIQQYMTELLMWQKPALSGEAILKMLGKCTHEKNEFKAAKHTYSAERFVWLTKLNNLRILEDGAERALNEEERQLLINHPYEKSKLTYAQVRKLLGLSEQAIFKHLRYSKENAESATFMELKAWHAIRKALENQGLKDTWQDLAKKPDLLDEIGTAFSLYKTDEDIQQYLTNKVPNSVINALLVSLNFDKFIELSLKSLRKILPLMEQGKRYDQACREIYGHHYGEANQKTSQLLPAIPAQEIRNPVVLRTLSQARKVINAIIRQYGSPARVHIETGRELGKSFKERREIQKQQEDNRTKRESAVQKFKELFSDFSSEPKSKDILKFRLYEQQHGKCLYSGKEINIHRLNEKGYVEIDHALPFSRTWDDSFNNKVLVLASENQNKGNQTPYEWLQGKINSERWKNFVALVLGSQCSAAKKQRLLTQVIDDNKFIDRNLNDTRYIARFLSNYIQENLLLVGKNKKNVFTPNGQITALLRSRWGLIKARENNNRHHALDAIVVACATPSMQQKITRFIRFKEVHPYKIENRYEMVDQESGEIISPHFPEPWAYFRQEVNIRVFDNHPDTVLKEMLPDRPQANHQFVQPLFVSRAPTRKMSGQGHMETIKSAKRLAEGISVLRIPLTQLKPNLLENMVNKEREPALYAGLKARLAEFNQDPAKAFATPFYKQGGQQVKAIRVEQVQKSGVLVRENNGVADNASIVRTDVFIKNNKFFLVPIYTWQVAKGILPNKAIVAHKNEDEWEEMDEGAKFKFSLFPNDLVELKTKKEYFFGYYIGLDRATGNISLKEHDGEISKGKDGVYRVGVKLALSFEKYQVDELGKNRQICRPQQRQPVR

SEQ ID NO: 44 - protein, 1517 aa, unknown
  Cas9 protein from Bacteroides species
MKKIVGLDLGTNSIGWALINAYINKEHLYGIEACGSRIIPMDAAILGNFDKGNSISQTADRTSYRGIRRLRERHLLRRERLHRILDLLGFLPKHYSDSLNRYGKFLNDIECKLPWVKDETGSYKFIFQESFKEMLANFTEHHPILIANNKKVPYDWTIYYLRKKALTQKISKEELAWILLNFNQKRGYYQLRGEEEETPNKLVEYYSLKVEKVEDSGERKGKDTWYNVHLENGMIYRRTSNIPLDWEGKTKEFIVTTDLEADGSPKKDKEGNIKRSFRAPKDDDWTLIKKKTEADIDKIKMTVGAYIYDTLLQKPDQKIRGKLVRTIERKYYKNELYQILKTQSEFHEELRDKQLYIACLNELYPNNEPRRNSISTRDFCHLFIEDIIFYQRPLKSKKSLIDNCPYEENRYIDKESGEIKHASIKCIAKSHPLYQEFRLWQFIVNLRIYRKETDVDVTQELLPTEADYVTLFEWLNEKKEIDQKAFFKYPPFGFKKTTSNYRWNYVEDKPYPCNETHAQIIARLGKAHIPKAFLSKEKEETLWHILYSIEDKQEIEKALHSFANKNNLSEEFIEQFKNFPPFKKEYGSYSAKAIKKLLPLMRMGKYWSIENIDNGTRIRINKIIDGEYDENIRERVRQKAINLTDITHFRALPLWLACYLVYDRHSEVKDIVKWKTPKDIDLYLKSFKQHSLRNPIVEQVITETLRTVRDIWQQVGHIDEIHIELGREMKNPADKRARMSQQMIKNENTNLRIKALLTEFLNPEFGIENVRPYSPSQQDLLRIYEEGVLNSILELPEDIGIILGKFNQTDTLKRPTRSEILRYKLWLEQKYRSPYTGEMIPLSKLFTPAYEIEHIIPQSRYFDDSLSNKVICESEINKLKDRSLGYEFIKNHHGEKVELAFDKPVEVLSVEAYEKLVHESYSHNRSKMKKLLMEDIPDQFIERQLNDSRYISKVVKSLLSNIVREENEQEAISKNVIPCTGGITDRLKKDWGINDVWNKIVLPRFIRLNELTESTRFTSINTNNTMIPSMPLELQKGFNKKRIDHRHHAMDAIIIACANRNIVNYLNNVSASKNTKITRRDLQTLLCHKDKTDNNGNYKWVIDKPWETFTQDTLTALQKITVSFKQNLRVINKTTNHYQHYENGKKIVSNQSKGDSWAIRKSMHKETVHGEVNLRMIKTVSFNEALKKPQAIVEMDLKKKILAMLELGYDTKRIKNYFEENKDTWQDINPSKIKVYYFTKETKDRYFAVRKPIDTSFDKKKIKESITDTGIQQIMLRHLETKDNDPTLAFSPDGIDEMNRNILILNKGKKHQPIYKVRVYEKAEKFTVGQKGNKRTKFVEAAKGTNLFFAIYETEEIDKDTKKVIRKRSYSTIPLNVVIERQKQGLSSAPEDENGNLPKYILSPNDLVYVPTQEEINKGEVVMPIDRDRIYKMVDSSGITANFIPASTANLIFALPKATAEIYCNGENCIQNEYGIGSPQSKNQKAITGEMVKEICFPIKVDRLGNIIQVGSCILTN

SEQ ID NO: 45 - protein, 1436 aa, Bacteroides fragilis
MKRILGLDLGTNSIGWALVNEAENKDERSSIVKLGVRVNPLTVDELTNFEKGKSITTNADRTLKRGMRRNLQRYKLRRETLTEVLKEHKLITEDTILSENGNRTTFETYRLRAKAVTEEISLEEFARVLLMINKKRGYKSSRKAKGVEEGTLIDGMDIARELYNNNLTPGELCLQLLDAGKKFLPDFYRSDLQNELDRIWEKQKEYYPEILTDVLKEELRGKKRDAVWAICAKYFVWKENYTEWNKEKGKTEQQEREHKLEGIYSKRKRDEAKRENLQWRVNGLKEKLSLEQLVIVFQEMNTQINNSSGYLGAISDRSKELYFNKQTVGQYQMEMLDKNPNASLRNMVFYRQDYLDEFNMLWEKQAVYHKELTEELKKEIRDIIIFYQRRLKSQKGLIGFCEFESRQIEVDIDGKKKIKTVGNRVISRSSPLFQEFKIWQILNNIEVTVVGKKRKRRKLKENYSALFEELNDAEQLELNGSRRLCQEEKELLAQELFIRDKMTKSEVLKLLFDNPQELDLNFKTIDGNKTGYALFQAYSKMIEMSGHEPVDFKKPVEKVVEYIKAVFDLLNWNTDILGFNSNEELDNQPYYKLWHLLYSFEGDNTPTGNGRLIQKMTELYGFEKEYATILANVSFQDDYGSLSAKAIHKILPHLKEGNRYDVACVYAGYRHSESSLTREEIANKVLKDRLMLLPKNSLHNPVVEKILNQMVNVINVIIDIYGKPDEIRVELARELKKNAKEREELTKSIAQTTKAHEEYKTLLQTEFGLTNVSRTDILRYKLYKELESCGYKTLYSNTYISREKLFSKEFDIEHIIPQARLFDDSFSNKTLEARSVNIEKGNKTAYDFVKEKFGESGADNSLEHYLNNIEDLFKSGKISKTKYNKLKMAEQDIPDGFIERDLRNTQYIAKKALSMLNEISHRVVATSGSVTDKLREDWQLIDVMKELNWEKYKALGLVEYFEDRDGRQIGRIKDWTKRNDHRHHAMDALTVAFTKDVFIQYFNNKNASLDPNANEHAIKNKYFQNGRAIAPMPLREFRAEAKKHLENTLISIKAKNKVITGNINKTRKKGGVNKNMQQTPRGQLHLETIYGSGKQYLTKEEKVNASFDMRKIGTVSKSAYRDALLKRLYENDNDPKKAFAGKNSLDKQPIWLDKEQMRKVPEKVKIVTLEAIYTIRKEISPDLKVDKVIDVGVRKILIDRLNEYGNDAKKAFSNLDKNPIWLNKEKGISIKRVTISGISNAQSLHVKKDKDGKPILDENGRNIPVDFVNTGNNHHVAVYYRPVIDKRGQLVVDEAGNPKYELEEVVVSFFEAVTRANLGLPIIDKDYKTTEGWQFLFSMKQNEYFVFPNEKTGFNPKEIDLLDVENYGLISPNLFRVQKFSLKNYVFRHHLETTIKDTSSILRGITWIDFRSSKGLDTIVKVRVNHIGQIVSVGEY

SEQ ID NO: 46 - protein, 1187 aa, Bifidobacterium longum
MLSRQLLGASHLARPVSYSYNVQDNDVHCSYGERCFMRGKRYRIGIDVGLNSVGLAAVEVSDENSPVRLLNAQSVIHDGGVDPQKNKEAITRKNMSGVARRTRRMRRRKRERLHKLDMLLGKFGYPVIEPESLDKPFEEWHVRAELATRYIEDDELRRESISIALRHMARHRGWRNPYRQVDSLISDNPYSKQYGELKEKAKAYNDDATAAEEESTPAQLVVAMLDAGYAEAPRLRWRTGSKKPDAEGYLPVRLMQEDNANELKQIFRVQRVPADEWKPLFRSVFYAVSPKGSAEQRVGQDPLAPEQARALKASLAFQEYRIANVITNLRIKDASAELRKLTVDEKQSIYDQLVSPSSEDITWSDLCDFLGFKRSQLKGVGSLTEDGEERISSRPPRLTSVQRIYESDNKIRKPLVAWWKSASDNEHEAMIRLLSNTVDIDKVREDVAYASAIEFIDGLDDDALTKLDSVDLPSGRAAYSVETLQKLTRQMLTTDDDLHEARKTLFNVTDSWRPPADPIGEPLGNPSVDRVLKNVNRYLMNCQQRWGNPVSVNIEHVRSSFSSVAFARKDKREYEKNNEKRSIFRSSLSEQLRADEQMEKVRESDLRRLEAIQRQNGQCLYCGRTITFRTCEMDHIVPRKGVGSTNTRTNFAAVCAECNRMKSNTPFAIWARSEDAQTRGVSLAEAKKRVTMFTFNPKSYAPREVKAFKQAVIARLQQTEDDAAIDNRSIESVAWMADELHRRIDWYFNAKQYVNSASIDDAEAETMKTTVSVFQGRVTASARRAAGIEGKIHFIGQQSKTRLDRRHHAVDASVIAMMNTAAAQTLMERESLRESQRLIGLMPGERSWKEYPYEGTSRYESFHLWLDNMDVLLELLNDALDNDRIAVMQSQRYVLGNSIAHDATIHPLEKVPLGSAMSADLIRRASTPALWCALTRLPDYDEKEGLPEDSHREIRVHDTRYSADDEMGFFASQAAQIAVQEGSADIGSAIHHARVYRCWKTNAKGVRKYFYGMIRVFQTDLLRACHDDLFTVPLPPQSISMRYGEPRVVQALQSGNAQYLGSLVVGDEIEMDFSSLDVDGQIGEYLQFFSQFSGGNLAWKHWVVDGFFNQTQLRIRPRYLAAEGLAKAFSDDVVPDGVQKIVTKQGWLPPVNTASKTAVRIVRRNAFGEPRLSSAHHMPCSWQWRHE

SEQ ID NO: 47 - protein, 1088 aa, Bacillus smithii
MNYKMGLDIGIASVGWAVINLDLKRIEDLGVRIFDKAEHPQNGESLALPRRIARSARRRLRRRKHRLERIRRLLVSENVLTKEEMNLLFKQKKQIDVWQLRVDALERKLNNDELARVLLHLAKRRGFKSNRKSERNSKESSEFLKNIEENQSILAQYRSVGEMIVKDSKFAYHKRNKLDSYSNMIARDDLEREIKLIFEKQREFNNPVCTERLEEKYLNIWSSQRPFASKEDIEKKVGFCTFEPKEKRAPKATYTFQSFIVWEHINKLRLVSPDETRALTEIERNLLYKQAFSKNKMTYYDIRKLLNLSDDIHFKGLLYDPKSSLKQIENIRFLELDSYHKIRKCIENVYGKDGIRMFNETDIDTFGYALTIFKDDEDIVAYLQNEYITKNGKRVSNLANKVYDKSLIDELLNLSFSKFAHLSMKAIRNILPYMEQGEIYSKACELAGYNFTGPKKKEKALLLPVIPNIANPVVMRALTQSRKVVNAIIKKYGSPVSIHIELARDLSHSFDERKKIQKDQTENRKKNETAIKQLIEYELTKNPTGLDIVKFKLWSEQQGRCMYSLKPIELERLLEPGYVEVDHILPYSRSLDDSYANKVLVLTKENREKGNHTPVEYLGLGSERWKKFEKFVLANKQFSKKKKQNLLRLRYEETEEKEFKERNLNDTRYISKFFANFIKEHLKFADGDGGQKVYTINGKITAHLRSRWDFNKNREESDLHHAVDAVIVACATQGMIKKITEFYKAREQNKESAKKKEPIFPQPWPHFADELKARLSKFPQESIEAFALGNYDRKKLESLRPVFVSRMPKRSVTGAAHQETLRRCVGIDEQSGKIQTAVKTKLSDIKLDKDGHFPMYQKESDPRTYEAIRQRLLEHNNDPKKAFQEPLYKPKKNGEPGPVIRTVKIIDTKNKVVHLDGSKTVAYNSNIVRTDVFEKDGKYYCVPVYTMDIMKGTLPNKAIEANKPYSEWKEMTEEYTFQFSLFPNDLVRIVLPREKTIKTSTNEEIIIKDIFAYYKTIDSATGGLELISHDRNFSLRGVGSKTLKRFEKYQVDVLGNIHKVKGEKRVGLAAPTNQKKGKTVDSLQSVSD

SEQ ID NO: 48 - protein, 1082 aa, Methylosinus trichosporium
MRVLGLDAGIASLGWALIEIEESNRGELSQGTIIGAGTWMFDAPEEKTQAGAKLKSEQRRTFRGQRRVVRRRRQRMNEVRRILHSHGLLPSSDRDALKQPGLDPWRIRAEALDRLLGPVELAVALGHIARHRGFKSNSKGAKTNDPADDTSKMKRAVNETREKLARFGSAAKMLVEDESFVLRQTPTKNGASEIVRRFRNREGDYSRSLLRDDLAAEMRALFTAQARFQSAIATADLQTAFTKAAFFQRPLQDSEKLVGPCPFEVDEKRAPKRGYSFELFRFLSRLNHVTLRDGKQERTLTRDELALAAADFGAAAKVSFTALRKKLKLPETTVFVGVKADEESKLDVVARSGKAAEGTARLRSVIVDALGELAWGALLCSPEKLDKIAEVISFRSDIGRISEGLAQAGCNAPLVDALTAAASDGRFDPFTGAGHISSKAARNILSGLRQGMTYDKACCAADYDHTASRERGAFDVGGHGREALKRILQEERISRELVGSPTARKALIESIKQVKAIVERYGVPDRIHVELARDVGKSIEEREEITRGIEKRNRQKDKLRGLFEKEVGRPPQDGARGKEELLRFELWSEQMGRCLYTDDYISPSQLVATDDAVQVDHILPWSRFADDSYANKTLCMAKANQDKKGRTPYEWFKAEKTDTEWDAFIVRVEALADMKGFKKRNYKLRNAEEAAAKFRNRNLNDTRWACRLLAEALKQLYPKGEKDKDGKERRRVFSRPGALTDRLRRAWGLQWMKKSTKGDRIPDDRHHALDAIVIAATTESLLQRATREVQEIEDKGLHYDLVKNVTPPWPGFREQAVEAVEKVFVARAERRRARGKAHDATIRHIAVREGEQRVYERRKVAELKLADLDRVKDAERNARLIEKLRNWIEAGSPKDDPPLSPKGDPIFKVRLVTKSKVNIALDTGNPKRPGTVDRGEMARVDVFRKASKKGKYEYYLVPIYPHDIATMKTPPIRAVQAYKPEDEWPEMDSSYEFCWSLVPMTYLQVISSKGEIFEGYYRGMNRSVGAIQLSAHSNSSDVVQGIGARTLTEFKKFNVDRFGRKHEVERELRTWRGETWRGKAYI

SEQ ID NO: 49 - protein, 1029 aa, Alicycliphilus denitrificans
MRSLRYRLALDLGSTSLGWALFRLDACNRPTAVIKAGVRIFSDGRNPKDGSSLAVTRRAARAMRRRRDRLLKRKTRMQAKLVEHGFFPADAGKRKALEQLNPYALRAKGLQEALLPGEFARALFHINQRRGFKSNRKTDKKDNDSGVLKKAIGQLRQQMAEQGSRTVGEYLWTRLQQGQGVRARYREKPYTTEEGKKRIDKSYDLYIDRAMIEQEFDALWAAQAAFNPTLFHEAARADLKDTLLHQRPLRPVKPGRCTLLPEEERAPLALPSTQRFRIHQEVNHLRLLDENLREVALTLAQRDAVVTALETKAKLSFEQIRKLLKLSGSVQFNLEDAKRTELKGNATSAALARKELFGAAWSGFDEALQDEIVWQLVTEEGEGALIAWLQTHTGVDEARAQAIVDVSLPEGYGNLSRKALARIVPALRAAVITYDKAVQAAGFDHHSQLGFEYDASEVEDLVHPETGEIRSVFKQLPYYGKALQRHVAFGSGKPEDPDEKRYGKIANPTVHIGLNQVRMVVNALIRRYGRPTEVVIELARDLKQSREQKVEAQRRQADNQRRNARIRRSIAEVLGIGEERVRGSDIQKWICWEELSFDAADRRCPYSGVQISAAMLLSDEVEVEHILPFSKTLDDSLNNRTVAMRQANRIKRNRTPWDARAEFEAQGWSYEDILQRAERMPLRKRYRFAPDGYERWLGDDKDFLARALNDTRYLSRVAAEYLRLVCPGTRVIPGQLTALLRGKFGLNDVLGLDGEKNRNDHRHHAVDACVIGVTDQGLMQRFATASAQARGDGLTRLVDGMPMPWPTYRDHVERAVRHIWVSHRPDHGFEGAMMEETSYGIRKDGSIKQRRKADGSAGREISNLIRIHEATQPLRHGVSADGQPLAYKGYVGGSNYCIEITVNDKGKWEGEVISTFRAYGVVRAGGMGRLRNPHEGQNGRKLIMRLVIGDSVRLEVDGAERTMRIVKISGSNGQIFMAPIHEANVDARNTDKQDAFTYTSKYAGSLQKAKTRRVTISPIGEVRDPGFKG

SEQ ID NO: 50 - protein, 1218 aa, Prevotella timonensis
MNKRILGLDTGTNSLGWAVVDWDEHAQSYELIKYGDVIFQEGVKIEKGIESSKAAERSGYKAIRKQYFRRRLRKIQVLKVLVKYHLCPYLSDDDLRQWHLQKQYPKSDELMLWQRTSDEEGKNPYYDRHRCLHEKLDLTVEADRYTLGRALYHLTQRRGFLSNRLDTSADNKEDGVVKSGISQLSTEMEEAGCEYLGDYFYKLYDAQGNKVRIRQRYTDRNKHYQHEFDAICEKQELSSELIEDLQRAIFFQLPLKSQRHGVGRCTFERGKPRCADSHPDYEEFRMLCFVNNIQVKGPHDLELRPLTYEEREKIEPLFFRKSKPNFDFEDIAKALAGKKNYAWIHDKEERAYKFNYRMTQGVPGCPTIAQLKSIFGDDWKTGIAETYTLIQKKNGSKSLQEMVDDVWNVLYSFSSVEKLKEFAHHKLQLDEESAEKFAKIKLSHSFAALSLKAIRKFLPFLRKGMYYTHASFFANIPTIVGKEIWNKEQNRKYIMENVGELVFNYQPKHREVQGTIEMLIKDFLANNFELPAGATDKLYHPSMIETYPNAQRNEFGILQLGSPRTNAIRNPMAMRSLHILRRVVNQLLKESIIDENTEVHVEYARELNDANKRRAIADRQKEQDKQHKKYGDEIRKLYKEETGKDIEPTQTDVLKFQLWEEQNHHCLYTGEQIGITDFIGSNPKFDIEHTIPQSVGGDSTQMNLTLCDNRFNREVKKAKLPTELANHEEILTRIEPWKNKYEQLVKERDKQRTFAGMDKAVKDIRIQKRHKLQMEIDYWRGKYERFTMTEVPEGFSRRQGTGIGLISRYAGLYLKSLFHQADSRNKSNVYVVKGVATAEFRKMWGLQSEYEKKCRDNHSHHCMDAITIACIGKREYDLMAEYYRMEETFKQGRGSKPKFSKPWATFTEDVLNIYKNLLVVHDTPNNMPKHTKKYVQTSIGKVLAQGDTARGSLHLDTYYGAIERDGEIRYVVRRPLSSFTKPEELENIVDETVKRTIKEAIADKNFKQAIAEPIYMNEEKGILIKKVRCFAKSVKQPINIRQHRDLSKKEYKQQYHVMNENNYLLAIYEGLVKNKVVREFEIVSYIEAAKYYKRSQDRNIFSSIVPTHSTKYGLPLKTKLLMGQLVLMFEENPDEIQVDNTKDLVKRLYKVVGIEKDGRIKFKYHQEARKEGLPIFSTPYKNNDDYAPIFRQSINNINILVDGIDFTIDILGKVTLKE

SEQ ID NO: 51 - protein, 1152 aa, Roseburia inulinivorans
MNAEHGKEGLLIMEENFQYRIGLDIGITSVGWAVLQNNSQDEPVRITDLGVRIFDVAENPKNGDALAAPRRDARTTRRRLRRRRHRLERIKFLLQENGLIEMDSFMERYYKGNLPDVYQLRYEGLDRKLKDEELAQVLIHIAKHRGFRSTRKAETKEKEGGAVLKATTENQKIMQEKGYRTVGEMLYLDEAFHTECLWNEKGYVLTPRNRPDDYKHTILRSMLVEEVHAIFAAQRAHGNQKATEGLEEAYVEIMTSQRSFDMGPGLQPDGKPSPYAMEGFGDRVGKCTFEKDEYRAPKATYTAELFVALQKINHTKLIDEFGTGRFFSEEERKTIIGLLLSSKELKYGTIRKKLNIDPSLKFNSLNYSAKKEGETEEERVLDTEKAKFASMFWTYEYSKCLKDRTEEMPVGEKADLFDRIGEILTAYKNDDSRSSRLKELGLSGEEIDGLLDLSPAKYQRVSLKAMRKMQPYLEDGLIYDKACEAAGYDFRALNDGNKKHLLKGEEINAIVNDITNPVVKRSVSQTIKVINAIIQKYGSPQAVNIELAREMSKNFQDRTNLEKEMKKRQQENERAKQQIIELGKQNPTGQDILKYRLWNDQGGYCLYSGKKIPLEELFDGGYDIDHILPYSITFDDSYRNKVLVTAQENRQKGNRTPYEYFGADEKRWEDYEASVRLLVRDYKKQQKLLKKNFTEEERKEFKERNLNDTKYITRVVYNMIRQNLELEPFNHPEKKKQVWAVNGAVTSYLRKRWGLMQKDRSTDRHHAMDAVVIACCTDGMIHKISRYMQGRELAYSRNFKFPDEETGEILNRDNFTREQWDEKFGVKVPLPWNSFRDELDIRLLNEDPKNFLLTHADVQRELDYPGWMYGEEESPIEEGRYINYIRPLFVSRMPNHKVTGSAHDATIRSARDYETRGVVITKVPLTDLKLNKDNEIEGYYDKDSDRLLYQALVRQLLLHGNDGKKAFAEDFHKPKADGTEGPVVRKVKIEKKQTSGVMVRGGTGIAANGEMVRIDVFRENGKYYFVPVYTADVVRKVLPNRAATHTKPYSEWRVMDDANFVFSLYSRDLIHVKSKKDIKTNLVNGGLLLQKEIFAYYTGADIATASIAGFANDSNFKFRGLGIQSLEIFEKCQVDILGNISVVRHENRQEFH

SEQ ID NO: 52 - protein, 1424 aa, unknown
  Cas9 protein sequence of Prevotella species C561
MTQKVLGLDLGTNSIGSAVRNLDLSDDLQWQLEFFSSDIFRSSVNKESNGREYSLAAQRSAHRRSRGLNEVRRRRLWATLNLLIKHGFCPMSSESLMRWCTYDKRKGLFREYPIDDKDFNAWILLDFNGDGRPDYSSPYQLRRELVTRQFDFEQPIERYKLGRALYHIAQHRGFKSSKGETLSQQETNSKPSSTDEIPDVAGAMKASEEKLSKGLSTYMKEHNLLTVGAAFAQLEDEGVRVRNNNDYRAIRSQFQHEIETIFKFQQGLSVESELYERLISEKKNVGTIFYKRPLRSQRGNVGKCTLERSKPRCAIGHPLFEKFRAWTLINNIKVRMSVDTLDEQLPMKLRLDLYNECFLAFVRTEFKFEDIRKYLEKRLGIHFSYNDKTINYKDSTSVAGCPITARFRKMLGEEWESFRVEGQKERQAHSKNNISFHRVSYSIEDIWHFCYDAEEPEAVLAFAQETLRLERKKAEELVRIWSAMPQGYAMLSQKAIRNINKILMLGLKYSDAVILAKVPELVDVSDEELLSIAKDYYLVEAQVNYDKRINSIVNGLIAKYKSVSEEYRFADHNYEYLLDESDEKDIIRQIENSLGARRWSLMDANEQTDILQKVRDRYQDFFRSHERKFVESPKLGESFENYLTKKFPMVEREQWKKLYHPSQITIYRPVSVGKDRSVLRLGNPDIGAIKNPTVLRVLNTLRRRVNQLLDDGVISPDETRVVVETARELNDANRKWALDTYNRIRHDENEKIKKILEEFYPKRDGISTDDIDKARYVIDQREVDYFTGSKTYNKDIKKYKFWLEQGGQCMYTGRTINLSNLFDPNAFDIEHTIPESLSFDSSDMNLTLCDAHYNRFIKKNHIPTDMPNYDKAITIDGKEYPAITSQLQRWVERVERLNRNVEYWKGQARRAQNKDRKDQCMREMHLWKMELEYWKKKLERFTVTEVTDGFKNSQLVDTRVITRHAVLYLKSIFPHVDVQRGDVTAKFRKILGIQSVDEKKDRSLHSHHAIDATTLTIIPVSAKRDRMLELFAKIEEINKMLSFSGSEDRTGLIQELEGLKNKLQMEVKVCRIGHNVSEIGTFINDNIIVNHHIKNQALTPVRRRLRKKGYIVGGVDNPRWQTGDALRGEIHKASYYGAITQFAKDDEGKVLMKEGRPQVNPTIKFVIRRELKYKKSAADSGFASWDDLGKAIVDKELFALMKGQFPAETSFKDACEQGIYMIKKGKNGMPDIKLHHIRHVRCEAPQSGLKIKEQTYKSEKEYKRYFYAAVGDLYAMCCYTNGKIREFRIYSLYDVSCHRKSDIEDIPEFITDKKGNRLMLDYKLRTGDMILLYKDNPAELYDLDNVNLSRRLYKINRFESQSNLVLMTHHLSTSKERGRSLGKTVDYQNLPESIRSSVKSLNFLIMGENRDFVIKNGKIIFNHR

SEQ ID NO: 53 - protein, 1079 aa, Dinoroseobacter shibae
MRLGLDIGTSSIGWWLYETDGAGSDARITGVVDGGVRIFSDGRDPKSGASLAVDRRAARAMRRRRDRYLRRRATLMKVLAETGLMPADPAEAKALEALDPFALRAAGLDEPLPLPHLGRALFHLNQRRGFKSNRKTDRGDNESGKIKDATARLDMEMMANGARTYGEFLHKRRQKATDPRHVPSVRTRLSIANRGGPDGKEEAGYDFYPDRRHLEEEFHKLWAAQGAHHPELTETLRDLLFEKIFFQRPLKEPEVGLCLFSGHHGVPPKDPRLPKAHPLTQRRVLYETVNQLRVTADGREARPLTREERDQVIHALDNKKPTKSLSSMVLKLPALAKVLKLRDGERFTLETGVRDAIACDPLRASPAHPDRFGPRWSILDADAQWEVISRIRRVQSDAEHAALVDWLTEAHGLDRAHAEATAHAPLPDGYGRLGLTATTRILYQLTADVVTYADAVKACGWHHSDGRTGECFDRLPYYGEVLERHVIPGSYHPDDDDITRFGRITNPTVHIGLNQLRRLVNRIIETHGKPHQIVVELARDLKKSEEQKRADIKRIRDTTEAAKKRSEKLEELEIEDNGRNRMLLRLWEDLNPDDAMRRFCPYTGTRISAAMIFDGSCDVDHILPYSRTLDDSFPNRTLCLREANRQKRNQTPWQAWGDTPHWHAIAANLKNLPENKRWRFAPDAMTRFEGENGFLDRALKDTQYLARISRSYLDTLFTKGGHVWVVPGRFTEMLRRHWGLNSLLSDAGRGAVKAKNRTDHRHHAIDAAVIAATDPGLLNRISRAAGQGEAAGQSAELIARDTPPPWEGFRDDLRVRLDRIIVSHRADHGRIDHAARKQGRDSTAGQLHQETAYSIVDDIHVASRTDLLSLKPAQLLDEPGRSGQVRDPQLRKALRVATGGKTGKDFENALRYFASKPGPYQAIRRVRIIKPLQAQARVPVPAQDPIKAYQGGSNHLFEIWRLPDGEIEAQVITSFEAHTLEGEKRPHPAAKRLLRVHKGDMVALERDGRRVVGHVQKMDIANGLFIVPHNEANADTRNNDKSDPFKWIQIGARPAIASGIRRVSVDEIGRLRDGGTRPI

SEQ ID NO: 54 - protein, 1473 aa, Flavobacterium branchiophilum
MAKILGLDLGTNSIGWAVVERENIDFSLIDKGVRIFSEGVKSEKGIESSRAAERTGYRSARKIKYRRKLRKYETLKVLSLNRMCPLSIEEVEEWKKSGFKDYPLNPEFLKWLSTDEESNVNPYFFRDRASKHKVSLFELGRAFYHIAQRRGFLSNRLDQSAEGILEEHCPKIEAIVEDLISIDEISTNITDYFFETGILDSNEKNGYAKDLDEGDKKLVSLYKSLLAILKKNESDFENCKSEIIERLNKKDVLGKVKGKIKDISQAMLDGNYKTLGQYFYSLYSKEKIRNQYTSREEHYLSEFITICKVQGIDQINEEEKINEKKFDGLAKDLYKAIFFQRPLKSQKGLIGKCSFEKSKSRCAISHPDFEEYRMWTYLNTIKIGTQSDKKLRFLTQDEKLKLVPKFYRKNDFNFDVLAKELIEKGSSFGFYKSSKKNDFFYWFNYKPTDTVAACQVAASLKNAIGEDWKTKSFKYQTINSNKEQVSRTVDYKDLWHLLTVATSDVYLYEFAIDKLGLDEKNAKAFSKTKLKKDFASLSLSAINKILPYLKEGLLYSHAVFVANIENIVDENIWKDEKQRDYIKTQISEIIENYTLEKSRFEIINGLLKEYKSENEDGKRVYYSKEAEQSFENDLKKKLVLFYKSNEIENKEQQETIFNELLPIFIQQLKDYEFIKIQRLDQKVLIFLKGKNETGQIFCTEEKGTAEEKEKKIKNRLKKLYHPSDIEKFKKKIIKDEFGNEKIVLGSPLTPSIKNPMAMRALHQLRKVLNALILEGQIDEKTIIHIEMARELNDANKRKGIQDYQNDNKKFREDAIKEIKKLYFEDCKKEVEPTEDDILRYQLWMEQNRSEIYEEGKNISICDIIGSNPAYDIEHTIPRSRSQDNSQMNKTLCSQRFNREVKKQSMPIELNNHLEILPRIAHWKEEADNLTREIEIISRSIKAAATKEIKDKKIRRRHYLTLKRDYLQGKYDRFIWEEPKVGFKNSQIPDTGIITKYAQAYLKSYFKKVESVKGGMVAEFRKIWGIQESFIDENGMKHYKVKDRSKHTHHTIDAITIACMTKEKYDVLAHAWTLEDQQNKKEARSIIEASKPWKTFKEDLLKIEEEILVSHYTPDNVKKQAKKIVRVRGKKQFVAEVERDVNGKAVPKKAASGKTIYKLDGEGKKLPRLQQGDTIRGSLHQDSIYGAIKNPLNTDEIKYVIRKDLESIKGSDVESIVDEVVKEKIKEAIANKVLLLSSNAQQKNKLVGTVWMNEEKRIAINKVRIYANSVKNPLHIKEHSLLSKSKHVHKQKVYGQNDENYAMAIYELDGKRDFELINIFNLAKLIKQGQGFYPLHKKKEIKGKIVFVPIEKRNKRDVVLKRGQQVVFYDKEVENPKDISEIVDFKGRIYIIEGLSIQRIVRPSGKVDEYGVIMLRYFKEARKADDIKQDNFKPDGVFKLGENKPTRKMNHNQFTAFVEGIDFKVLPSGKFEKI

SEQ ID NO: 55 - protein, 1195 aa, Elusimicrobium minutum
MQKNINTKQNHIYIKQAQKIKEKLGDKPYRIGLDLGVGSIGFAIVSMEENDGNVLLPKEIIMVGSRIFKASAGAADRKLSRGQRNNHRHTRERMRYLWKVLAEQKLALPVPADLDRKENSSEGETSAKRFLGDVLQKDIYELRVKSLDERLSLQELGYVLYHIAGHRGSSAIRTFENDSEEAQKENTENKKIAGNIKRLMAKKNYRTYGEYLYKEFFENKEKHKREKISNAANNHKFSPTRDLVIKEAEAILKKQAGKDGFHKELTEEYIEKLTKAIGYESEKLIPESGFCPYLKDEKRLPASHKLNEERRLWETLNNARYSDPIVDIVTGEITGYYEKQFTKEQKQKLFDYLLTGSELTPAQTKKLLGLKNTNFEDIILQGRDKKAQKIKGYKLIKLESMPFWARLSEAQQDSFLYDWNSCPDEKLLTEKLSNEYHLTEEEIDNAFNEIVLSSSYAPLGKSAMLIILEKIKNDLSYTEAVEEALKEGKLTKEKQAIKDRLPYYGAVLQESTQKIIAKGFSPQFKDKGYKTPHTNKYELEYGRIANPVVHQTLNELRKLVNEIIDILGKKPCEIGLETARELKKSAEDRSKLSREQNDNESNRNRIYEIYIRPQQQVIITRRENPRNYILKFELLEEQKSQCPFCGGQISPNDIINNQADIEHLFPIAESEDNGRNNLVISHSACNADKAKRSPWAAFASAAKDSKYDYNRILSNVKENIPHKAWRFNQGAFEKFIENKPMAARFKTDNSYISKVAHKYLACLFEKPNIICVKGSLTAQLRMAWGLQGLMIPFAKQLITEKESESFNKDVNSNKKIRLDNRHHALDAIVIAYASRGYGNLLNKMAGKDYKINYSERNWLSKILLPPNNIVWENIDADLESFESSVKTALKNAFISVKHDHSDNGELVKGTMYKIFYSERGYTLTTYKKLSALKLTDPQKKKTPKDFLETALLKFKGRESEMKNEKIKSAIENNKRLFDVIQDNLEKAKKLLEEENEKSKAEGKKEKNINDASIYQKAISLSGDKYVQLSKKEPGKFFAISKPTPTTTGYGYDTGDSLCVDLYYDNKGKLCGEIIRKIDAQQKNPLKYKEQGFTLFERIYGGDILEVDFDIHSDKNSFRNNTGSAPENRVFIKVGTFTEITNNNIQIWFGNIIKSTGGQDDSFTINSMQQYNPRKLILSSCGFIKYRSPILKNKEG

SEQ ID NO: 56 - protein, 1688 aa, Ignavibacterium album
MEFKKVLGLDIGTNSIGCALLSLPKSIQDYGKGGRLEWLTSRVIPLDADYMKAFIDGKNGLPQVITPAGKRRQKRGSRRLKHRYKLRRSRLIRVFKTLNWLPEDFPLDNPKRIKETISTEGKFSFRISDYVPISDESYREFYREFGYPENEIEQVIEEINFRRKTKGKNKNPMIKLLPEDWVVYYLRKKALIKPTTKEELIRIIYLFNQRRGFKSSRKDLTETAILDYDEFAKRLAEKEKYSAENYETKFVSITKVKEVVELKTDGRKGKKRFKVILEDSRIEPYEIERKEKPDWEGKEYTFLVTQKLEKGKFKQNKPDLPKEEDWALCTTALDNRMGSKHPGEFFFDELLKAFKEKRGYKIRQYPVNRWRYKKELEFIWTKQCQLNPELNNLNINKEILRKLATVLYPSQSKFFGPKIKEFENSDVLHIISEDIIYYQRDLKSQKSLISECRYEKRKGIDGEIYGLKCIPKSSPLYQEFRIWQDIHNIKVIRKESEVNGKKKINIDETQLYINENIKEKLFELFNSKDSLSEKDILELISLNIINSGIKISKKEEETTHRINLFANRKELKGNETKSRYRKVFKKLGFDGEYILNHPSKLNRLWHSDYSNDYADKEKTEKSILSSLGWKNRNGKWEKSKNYDVFNLPLEVAKAIANLPPLKKEYGSYSALAIRKMLVVMRDGKYWQHPDQIAKDQENTSLMLFDKNLIQLTNNQRKVLNKYLLTLAEVQKRSTLIKQKLNEIEHNPYKLELVSDQDLEKQVLKSFLEKKNESDYLKGLKTYQAGYLIYGKHSEKDVPIVNSPDELGEYIRKKLPNNSLRNPIVEQVIRETIFIVRDVWKSFGIIDEIHIELGRELKNNSEERKKTSESQEKNFQEKERARKLLKELLNSSNFEHYDENGNKIFSSFTVNPNPDSPLDIEKFRIWKNQSGLTDEELNKKLKDEKIPTEIEVKKYILWLTQKCRSPYTGKIIPLSKLFDSNVYEIEHIIPRSKMKNDSTNNLVICELGVNKAKGDRLAANFISESNGKCKFGEVEYTLLKYGDYLQYCKDTFKYQKAKYKNLLATEPPEDFIERQINDTRYIGRKLAELLTPVVKDSKNIIFTIGSITSELKITWGLNGVWKDILRPRFKRLESIINKKLIFQDEDDPNKYHFDLSINPQLDKEGLKRLDHRHHALDATIIAATTREHVRYLNSLNAADNDEEKREYFLSLCNHKIRDFKLPWENFTSEVKSKLLSCVVSYKESKPILSDPFNKYLKWEYKNGKWQKVFAIQIKNDRWKAVRRSMFKEPIGTVWIKKIKEVSLKEAIKIQAIWEEVKNDPVRKKKEKYIYDDYAQKVIAKIVQELGLSSSMRKQDDEKLNKFINEAKVSAGVNKNLNTTNKTIYNLEGRFYEKIKVAEYVLYKAKRMPLNKKEYIEKLSLQKMFNDLPNFILEKSILDNYPEILKELESDNKYIIEPHKKNNPVNRLLLEHILEYHNNPKEAFSTEGLEKLNKKAINKIGKPIKYITRLDGDINEEEIFRGAVFETDKGSNVYFVMYENNQTKDREFLKPNPSISVLKAIEHKNKIDFFAPNRLGFSRIILSPGDLVYVPTNDQYVLIKDNSSNETIINWDDNEFISNRIYQVKKFTGNSCYFLKNDIASLILSYSASNGVGEFGSQNISEYSVDDPPIRIKDVCIKIRVDRLGNVRPL

SEQ ID NO: 57 - protein, 1498 aa, Odoribacter laneus
METTLGIDLGTNSIGLALVDQEEHQILYSGVRIFPEGINKDTIGLGEKEESRNATRRAKRQMRRQYFRKKLRKAKLLELLIAYDMCPLKPEDVRRWKNWDKQQKSTVRQFPDTPAFREWLKQNPYELRKQAVTEDVTRPELGRILYQMIQRRGFLSSRKGKEEGKIFTGKDRMVGIDETRKNLQKQTLGAYLYDIAPKNGEKYRFRTERVRARYTLRDMYIREFEIIWQRQAGHLGLAHEQATRKKNIFLEGSATNVRNSKLITHLQAKYGRGHVLIEDTRITVTFQLPLKEVLGGKIEIEEEQLKFKSNESVLFWQRPLRSQKSLLSKCVFEGRNFYDPVHQKWIIAGPTPAPLSHPEFEEFRAYQFINNIIYGKNEHLTAIQREAVFELMCTESKDFNFEKIPKHLKLFEKFNFDDTTKVPACTTISQLRKLFPHPVWEEKREEIWHCFYFYDDNTLLFEKLQKDYALQTNDLEKIKKIRLSESYGNVSLKAIRRINPYLKKGYAYSTAVLLGGIRNSFGKRFEYFKEYEPEIEKAVCRILKEKNAEGEVIRKIKDYLVHNRFGFAKNDRAFQKLYHHSQAITTQAQKERLPETGNLRNPIVQQGLNELRRTVNKLLATCREKYGPSFKFDHIHVEMGRELRSSKTEREKQSRQIRENEKKNEAAKVKLAEYGLKAYRDNIQKYLLYKEIEEKGGTVCCPYTGKTLNISHTLGSDNSVQIEHIIPYSISLDDSLANKTLCDATFNREKGELTPYDFYQKDPSPEKWGASSWEEIEDRAFRLLPYAKAQRFIRRKPQESNEFISRQLNDTRYISKKAVEYLSAICSDVKAFPGQLTAELRHLWGLNNILQSAPDITFPLPVSATENHREYYVITNEQNEVIRLFPKQGETPRTEKGELLLTGEVERKVFRCKGMQEFQTDVSDGKYWRRIKLSSSVTWSPLFAPKPISADGQIVLKGRIEKGVFVCNQLKQKLKTGLPDGSYWISLPVISQTFKEGESVNNSKLTSQQVQLFGRVREGIFRCHNYQCPASGADGNFWCTLDTDTAQPAFTPIKNAPPGVGGGQIILTGDVDDKGIFHADDDLHYELPASLPKGKYYGIFTVESCDPTLIPIELSAPKTSKGENLIEGNIWVDEHTGEVRFDPKKNREDQRHHAIDAIVIALSSQSLFQRLSTYNARRENKKRGLDSTEHFPSPWPGFAQDVRQSVVPLLVSYKQNPKTLCKISKTLYKDGKKIHSCGNAVRGQLHKETVYGQRTAPGATEKSYHIRKDIRELKTSKHIGKVVDITIRQMLLKHLQENYHIDITQEFNIPSNAFFKEGVYRIFLPNKHGEPVPIKKIRMKEELGNAERLKDNINQYVNPRNNHHVMIYQDADGNLKEEIVSFWSVIERQNQGQPIYQLPREGRNIVSILQINDTFLIGLKEEEPEVYRNDLSTLSKHLYRVQKLSGMYYTFRHHLASTLNNEREEFRIQSLEAWKRANPVKVQIDEIGRITFLNGPLC

SEQ ID NO: 58 - protein, 1442 aa, Caenispirillum salinarum
MPVLSPLSPNAAQGRRRWSLALDIGEGSIGWAVAEVDAEGRVLQLTGTGVTLFPSAWSNENGTYVAHGAADRAVRGQQQRHDSRRRRLAGLARLCAPVLERSPEDLKDLTRTPPKADPRAIFFLRADAARRPLDGPELFRVLHHMAAHRGIRLAELQEVDPPPESDADDAAPAATEDEDGTRRAAADERAFRRLMAEHMHRHGTQPTCGEIMAGRLRETPAGAQPVTRARDGLRVGGGVAVPTRALIEQEFDAIRAIQAPRHPDLPWDSLRRLVLDQAPIAVPPATPCLFLEELRRRGETFQGRTITREAIDRGLTVDPLIQALRIRETVGNLRLHERITEPDGRQRYVPRAMPELGLSHGELTAPERDTLVRALMHDPDGLAAKDGRIPYTRLRKLIGYDNSPVCFAQERDTSGGGITVNPTDPLMARWIDGWVDLPLKARSLYVRDVVARGADSAALARLLAEGAHGVPPVAAAAVPAATAAILESDIMQPGRYSVCPWAAEAILDAWANAPTEGFYDVTRGLFGFAPGEIVLEDLRRARGALLAHLPRTMAAARTPNRAAQQRGPLPAYESVIPSQLITSLRRAHKGRAADWSAADPEERNPFLRTWTGNAATDHILNQVRKTANEVITKYGNRRGWDPLPSRITVELAREAKHGVIRRNEIAKENRENEGRRKKESAALDTFCQDNTVSWQAGGLPKERAALRLRLAQRQEFFCPYCAERPKLRATDLFSPAETEIDHVIERRMGGDGPDNLVLAHKDCNNAKGKKTPHEHAGDLLDSPALAALWQGWRKENADRLKGKGHKARTPREDKDFMDRVGWRFEEDARAKAEENQERRGRRMLHDTARATRLARLYLAAAVMPEDPAEIGAPPVETPPSPEDPTGYTAIYRTISRVQPVNGSVTHMLRQRLLQRDKNRDYQTHHAEDACLLLLAGPAVVQAFNTEAAQHGADAPDDRPVDLMPTSDAYHQQRRARALGRVPLATVDAALADIVMPESDRQDPETGRVHWRLTRAGRGLKRRIDDLTRNCVILSRPRRPSETGTPGALHNATHYGRREITVDGRTDTVVTQRMNARDLVALLDNAKIVPAARLDAAAPGDTILKEICTEIADRHDRVVDPEGTHARRWISARLAALVPAHAEAVARDIAELADLDALADADRTPEQEARRSALRQSPYLGRAISAKKADGRARAREQEILTRALLDPHWGPRGLRHLIMREARAPSLVRIRANKTDAFGRPVPDAAVWVKTDGNAVSQLWRLTSVVTDDGRRIPLPKPIEKRIEISNLEYARLNGLDEGAGVTGNNAPPRPLRQDIDRLTPLWRDHGTAPGGYLGTAVGELEDKARSALRGKAMRQTLTDAGITAEAGWRLDSEGAVCDLEVAKGDTVKKDGKTYKVGVITQGIFGMPVDAAGSAPRTPEDCEKFEEQYGIKPWKAKGIPLA

SEQ ID NO: 59 - protein, 1197 aa, unknown
  Cas9 protein sequence of Porphyromonas species oral taxon 279 str. F0450
MLMSKHVLGLDLGVGSIGWCLIALDAQGDPAEILGMGSRVVPLNNATKAIEAFNAGAAFTASQERTARRTMRRGFARYQLRRYRLRRELEKVGMLPDAALIQLPLLELWELRERAATAGRRLTLPELGRVLCHINQKRGYRHVKSDAAAIVGDEGEKKKDSNSAYLAGIRANDEKLQAEHKTVGQYFAEQLRQNQSESPTGGISYRIKDQIFSRQCYIDEYDQIMAVQRVHYPDILTDEFIRMLRDEVIFMQRPLKSCKHLVSLCEFEKQERVMRVQQDDGKGGWQLVERRVKFGPKVAPKSSPLFQLCCIYEAVNNIRLTRPNGSPCDITPEERAKIVAHLQSSASLSFAALKKLLKEKALIADQLTSKSGLKGNSTRVALASALQPYPQYHHLLDMELETRMMTVQLTDEETGEVTEREVAVVTDSYVRKPLYRLWHILYSIEEREAMRRALITQLGMKEEDLDGGLLDQLYRLDFVKPGYGNKSAKFICKLLPQLQQGLGYSEACAAVGYRHSNSPTSEEITERTLLEKIPLLQRNELRQPLVEKILNQMINLVNALKAEYGIDEVRVELARELKMSREERERMARNNKDREERNKGVAAKIRECGLYPTKPRIQKYMLWKEAGRQCLYCGRSIEEEQCLREGGMEVEHIIPKSVLYDDSYGNKTCACRRCNKEKGNRTALEYIRAKGREAEYMKRINDLLKEKKISYSKHQRLRWLKEDIPSDFLERQLRLTQYISRQAMAILQQGIRRVSASEGGVTARLRSLWGYGKILHTLNLDRYDSMGETERVSREGEATEELHITNWSKRMDHRHHAIDALVVACTRQSYIQRLNRLSSEFGREDKKKEDQEAQEQQATETGRLSNLERWLTQRPHFSVRTVSDKVAEILISYRPGQRVVTRGRNIYRKKMADGREVSCVQRGVLVPRGELMEASFYGKILSQGRVRIVKRYPLHDLKGEVVDPHLRELITTYNQELKSREKGAPIPPLCLDKDKKQEVRSVRCYAKTLSLDKAIPMCFDEKGEPTAFVKSASNHHLALYRTPKGKLVESIVTFWDAVDRARYGIPLVITHPREVMEQVLQRGDIPEQVLSLLPPSDWVFVDSLQQDEMVVIGLSDEELQRALEAQNYRKISEHLYRVQKMSSSYYVFRYHLETSVADDKNTSGRIPKFHRVQSLKAYEERNIRKVRVDLLGRISLL

SEQ ID NO: 60 - protein, 1181 aa, unknown
  Cas9 protein sequence of Actinomyces species oral taxon 180 str. F0310
MLHCIAVIRVPPSEEPGFFETHADSCALCHHGCMTYAANDKAIRYRVGIDVGLRSIGFCAVEVDDEDHPIRILNSVVHVHDAGTGGPGETESLRKRSGVAARARRRGRAEKQRLKKLDVLLEELGWGVSSNELLDSHAPWHIRKRLVSEYIEDETERRQCLSVAMAHIARHRGWRNSFSKVDTLLLEQAPSDRMQGLKERVEDRTGLQFSEEVTQGELVATLLEHDGDVTIRGFVRKGGKATKVHGVLEGKYMQSDLVAELRQICRTQRVSETTFEKLVLSIFHSKEPAPSAARQRERVGLDELQLALDPAAKQPRAERAHPAFQKFKVVATLANMRIREQSAGERSLTSEELNRVARYLLNHTESESPTWDDVARKLEVPRHRLRGSSRASLETGGGLTYPPVDDTTVRVMSAEVDWLADWWDCANDESRGHMIDAISNGCGSEPDDVEDEEVNELISSATAEDMLKLELLAKKLPSGRVAYSLKTLREVTAAILETGDDLSQAITRLYGVDPGWVPTPAPIEAPVGNPSVDRVLKQVARWLKFASKRWGVPQTVNIEHTREGLKSASLLEEERERWERFEARREIRQKEMYKRLGISGPFRRSDQVRYEILDLQDCACLYCGNEINFQTFEVDHIIPRVDASSDSRRTNLAAVCHSCNSAKGGLAFGQWVKRGDCPSGVSLENAIKRVRSWSKDRLGLTEKAMGKRKSEVISRLKTEMPYEEFDGRSMESVAWMAIELKKRIEGYFNSDRPEGCAAVQVNAYSGRLTACARRAAHVDKRVRLIRLKGDDGHHKNRFDRRNHAMDALVIALMTPAIARTIAVREDRREAQQLTRAFESWKNFLGSEERMQDRWESWIGDVEYACDRLNELIDADKIPVTENLRLRNSGKLHADQPESLKKARRGSKRPRPQRYVLGDALPADVINRVTDPGLWTALVRAPGFDSQLGLPADLNRGLKLRGKRISADFPIDYFPTDSPALAVQGGYVGLEFHHARLYRIIGPKEKVKYALLRVCAIDLCGIDCDDLFEVELKPSSISMRTADAKLKEAMGNGSAKQIGWLVLGDEIQIDPTKFPKQSIGKFLKECGPVSSWRVSALDTPSKITLKPRLLSNEPLLKTSRVGGHESDLVVAECVEKIMKKTGWVVEINALCQSGLIRVIRRNALGEVRTSPKSGLPISLNLR

SEQ ID NO: 61 - protein, 1179 aa, Sphaerochaeta globosa
MSKKVSRRYEEQAQEICQRLGSRPYSIGLDLGVGSIGVAVAAYDPIKKQPSDLVFVSSRIFIPSTGAAERRQKRGQRNSLRHRANRLKFLWKLLAERNLMLSYSEQDVPDPARLRFEDAVVRANPYELRLKGLNEQLTLSELGYALYHIANHRGSSSVRTFLDEEKSSDDKKLEEQQAMTEQLAKEKGISTFIEVLTAFNTNGLIGYRNSESVKSKGVPVPTRDIISNEIDVLLQTQKQFYQEILSDEYCDRIVSAILFENEKIVPEAGCCPYFPDEKKLPRCHFLNEERRLWEAINNARIKMPMQEGAAKRYQSASFSDEQRHILFHIARSGTDITPKLVQKEFPALKTSIIVLQGKEKAIQKIAGFRFRRLEEKSFWKRLSEEQKDDFFSAWTNTPDDKRLSKYLMKHLLLTENEVVDALKTVSLIGDYGPIGKTATQLLMKHLEDGLTYTEALERGMETGEFQELSVWEQQSLLPYYGQILTGSTQALMGKYWHSAFKEKRDSEGFFKPNTNSDEEKYGRIANPVVHQTLNELRKLMNELITILGAKPQEITVELARELKVGAEKREDIIKQQTKQEKEAVLAYSKYCEPNNLDKRYIERFRLLEDQAFVCPYCLEHISVADIAAGRADVDHIFPRDDTADNSYGNKVVAHRQCNDIKGKRTPYAAFSNTSAWGPIMHYLDETPGMWRKRRKFETNEEEYAKYLQSKGFVSRFESDNSYIAKAAKEYLRCLFNPNNVTAVGSLKGMETSILRKAWNLQGIDDLLGSRHWSKDADTSPTMRKNRDDNRHHGLDAIVALYCSRSLVQMINTMSEQGKRAVEIEAMIPIPGYASEPNLSFEAQRELFRKKILEFMDLHAFVSMKTDNDANGALLKDTVYSILGADTQGEDLVFVVKKKIKDIGVKIGDYEEVASAIRGRITDKQPKWYPMEMKDKIEQLQSKNEAALQKYKESLVQAAAVLEESNRKLIESGKKPIQLSEKTISKKALELVGGYYYLISNNKRTKTFVVKEPSNEVKGFAFDTGSNLCLDFYHDAQGKLCGEIIRKIQAMNPSYKPAYMKQGYSLYVRLYQGDVCELRASDLTEAESNLAKTTHVRLPNAKPGRTFVIIITFTEMGSGYQIYFSNLAKSKKGQDTSFTLTTIKNYDVRKVQLSSAGLVRYVSPLLVDKIEKDEVALCGE

SEQ ID NO: 62 - protein, 1173 aa, Rhodospirillum rubrum
MRPIEPWILGLDIGTDSLGWAVFSCEEKGPPTAKELLGGGVRLFDSGRDAKDHTSRQAERGAFRRARRQTRTWPWRRDRLIALFQAAGLTPPAAETRQIALALRREAVSRPLAPDALWAALLHLAHHRGFRSNRIDKRERAAAKALAKAKPAKATAKATAPAKEADDEAGFWEGAEAALRQRMAASGAPTVGALLADDLDRGQPVRMRYNQSDRDGVVAPTRALIAEELAEIVARQSSAYPGLDWPAVTRLVLDQRPLRSKGAGPCAFLPGEDRALRALPTVQDFIIRQTLANLRLPSTSADEPRPLTDEEHAKALALLSTARFVEWPALRRALGLKRGVKFTAETERNGAKQAARGTAGNLTEAILAPLIPGWSGWDLDRKDRVFSDLWAARQDRSALLALIGDPRGPTRVTEDETAEAVADAIQIVLPTGRASLSAKAARAIAQAMAPGIGYDEAVTLALGLHHSHRPRQERLARLPYYAAALPDVGLDGDPVGPPPAEDDGAAAEAYYGRIGNISVHIALNETRKIVNALLHRHGPILRLVMVETTRELKAGADERKRMIAEQAERERENAEIDVELRKSDRWMANARERRQRVRLARRQNNLCPYTSTPIGHADLLGDAYDIDHVIPLARGGRDSLDNMVLCQSDANKTKGDKTPWEAFHDKPGWIAQRDDFLARLDPQTAKALAWRFADDAGERVARKSAEDEDQGFLPRQLTDTGYIARVALRYLSLVTNEPNAVVATNGRLTGLLRLAWDITPGPAPRDLLPTPRDALRDDTAARRFLDGLTPPPLAKAVEGAVQARLAALGRSRVADAGLADALGLTLASLGGGGKNRADHRHHFIDAAMIAVTTRGLINQINQASGAGRILDLRKWPRTNFEPPYPTFRAEVMKQWDHIHPSIRPAHRDGGSLHAATVFGVRNRPDARVLVQRKPVEKLFLDANAKPLPADKIAEIIDGFASPRMAKRFKALLARYQAAHPEVPPALAALAVARDPAFGPRGMTANTVIAGRSDGDGEDAGLITPFRANPKAAVRTMGNAVYEVWEIQVKGRPRWTHRVLTRFDRTQPAPPPPPENARLVMRLRRGDLVYWPLESGDRLFLVKKMAVDGRLALWPARLATGKATALYAQLSCPNINLNGDQGYCVQSAEGIRKEKIRTTSCTALGRLRLSKKAT

SEQ ID NO: 63 - protein, 1168 aa, unknown
  Cas9 protein sequence of Azospirillum species B510
MARPAFRAPRREHVNGWTPDPHRISKPFFILVSWHLLSRVVIDSSSGCFPGTSRDHTDKFAEWECAVQPYRLSFDLGTNSIGWGLLNLDRQGKPREIRALGSRIFSDGRDPQDKASLAVARRLARQMRRRRDRYLTRRTRLMGALVRFGLMPADPAARKRLEVAVDPYLARERATRERLEPFEIGRALFHLNQRRGYKPVRTATKPDEEAGKVKEAVERLEAAIAAAGAPTLGAWFAWRKTRGETLRARLAGKGKEAAYPFYPARRMLEAEFDTLWAEQARHHPDLLTAEAREILRHRIFHQRPLKPPPVGRCTLYPDDGRAPRALPSAQRLRLFQELASLRVIHLDLSERPLTPAERDRIVAFVQGRPPKAGRKPGKVQKSVPFEKLRGLLELPPGTGFSLESDKRPELLGDETGARIAPAFGPGWTALPLEEQDALVELLLTEAEPERAIAALTARWALDEATAAKLAGATLPDFHGRYGRRAVAELLPVLERETRGDPDGRVRPIRLDEAVKLLRGGKDHSDFSREGALLDALPYYGAVLERHVAFGTGNPADPEEKRVGRVANPTVHIALNQLRHLVNAILARHGRPEEIVIELARDLKRSAEDRRREDKRQADNQKRNEERKRLILSLGERPTPRNLLKLRLWEEQGPVENRRCPYSGETISMRMLLSEQVDIDHILPFSVSLDDSAANKVVCLREANRIKRNRSPWEAFGHDSERWAGILARAEALPKNKRWRFAPDALEKLEGEGGLRARHLNDTRHLSRLAVEYLRCVCPKVRVSPGRLTALLRRRWGIDAILAEADGPPPEVPAETLDPSPAEKNRADHRHHALDAVVIGCIDRSMVQRVQLAAASAEREAAAREDNIRRVLEGFKEEPWDGFRAELERRARTIVVSHRPEHGIGGALHKETAYGPVDPPEEGFNLVVRKPIDGLSKDEINSVRDPRLRRALIDRLAIRRRDANDPATALAKAAEDLAAQPASRGIRRVRVLKKESNPIRVEHGGNPSGPRSGGPFHKLLLAGEVHHVDVALRADGRRWVGHWVTLFEAHGGRGADGAAAPPRLGDGERFLMRLHKGDCLKLEHKGRVRVMQVVKLEPSSNSVVVVEPHQVKTDRSKHVKISCDQLRARGARRVTVDPLGRVRVHAPGARVGIGGDAGRTAMEPAEDIS

SEQ ID NO: 64 - protein, 1166 aa, Nitrobacter hamburgensis
MHVEIDFPHFSRGDSHLAMNKNEILRGSSVLYRLGLDLGSNSLGWFVTHLEKRGDRHEPVALGPGGVRIFPDGRDPQSGTSNAVDRRMARGARKRRDRFVERRKELIAALIKYNLLPDDARERRALEVLDPYALRKTALTDTLPAHHVGRALFHLNQRRGFQSNRKTDSKQSEDGAIKQAASRLATDKGNETLGVFFADMHLRKSYEDRQTAIRAELVRLGKDHLTGNARKKIWAKVRKRLFGDEVLPRADAPHGVRARATITGTKASYDYYPTRDMLRDEFNAIWAGQSAHHATITDEARTEIEHIIFYQRPLKPAIVGKCTLDPATRPFKEDPEGYRAPWSHPLAQRFRILSEARNLEIRDTGKGSRRLTKEQSDLVVAALLANREVKFDKLRTLLKLPAEARFNLESDRRAALDGDQTAARLSDKKGFNKAWRGFPPERQIAIVARLEETEDENELIAWLEKECALDGAAAARVANTTLPDGHCRLGLRAIKKIVPIMQDGLDEDGVAGAGYHIAAKRAGYDHAKLPTGEQLGRLPYYGQWLQDAVVGSGDARDQKEKQYGQFPNPTVHIGLGQLRRVVNDLIDKYGPPTEISIEFTRALKLSEQQKAERQREQRRNQDKNKARAEELAKFGRPANPRNLLKMRLWEELAHDPLDRKCVYTGEQISIERLLSDEVDIDHILPVAMTLDDSPANKIICMRYANRHKRKQTPSEAFGSSPTLQGHRYNWDDIAARATGLPRNKRWRFDANAREEFDKRGGFLARQLNETGWLARLAKQYLGAVTDPNQIWVVPGRLTSMLRGKWGLNGLLPSDNYAGVQDKAEEFLASTDDMEFSGVKNRADHRHHAIDGLVTALTDRSLLWKMANAYDEEHEKFVIEPPWPTMRDDLKAALEKMVVSHKPDHGIEGKLHEDSAYGFVKPLDATGLKEEEAGNLVYRKAIESLNENEVDRIRDIQLRTIVRDHVNVEKTKGVALADALRQLQAPSDDYPQFKHGLRHVRILKKEKGDYLVPIANRASGVAYKAYSAGENFCVEVFETAGGKWDGEAVRRFDANKKNAGPKIAHAPQWRDANEGAKLVMRIHKGDLIRLDHEGRARIMVVHRLDAAAGRFKLADHNETGNLDKRHATNNDIDPFRWLMASYNTLKKLAAVPVRVDELGRVWRVMPN

SEQ ID NO: 65 - protein, 1156 aa, Ruminococcus albus
MGNYYLGLDVGIGSIGWAVINIEKKRIEDFNVRIFKSGEIQEKNRNSRASQQCRRSRGLRRLYRRKSHRKLRLKNYLSIIGLTTSEKIDYYYETADNNVIQLRNKGLSEKLTPEEIAACLIHICNNRGYKDFYEVNVEDIEDPDERNEYKEEHDSIVLISNLMNEGGYCTPAEMICNCREFDEPNSVYRKFHNSAASKNHYLITRHMLVKEVDLILENQSKYYGILDDKTIAKIKDIIFAQRDFEIGPGKNERFRRFTGYLDSIGKCQFFKDQERGSRFTVIADIYAFVNVLSQYTYTNNRGESVFDTSFANDLINSALKNGSMDKRELKAIAKSYHIDISDKNSDTSLTKCFKYIKVVKPLFEKYGYDWDKLIENYTDTDNNVLNRIGIVLSQAQTPKRRREKLKALNIGLDDGLINELTKLKLSGTANVSYKYMQGSIEAFCEGDLYGKYQAKFNKEIPDIDENAKPQKLPPFKNEDDCEFFKNPVVFRSINETRKLINAIIDKYGYPAAVNIETADELNKTFEDRAIDTKRNNDNQKENDRIVKEIIECIKCDEVHARHLIEKYKLWEAQEGKCLYSGETITKEDMLRDKDKLFEVDHIVPYSLILDNTINNKALVYAEENQKKGQRTPLMYMNEAQAADYRVRVNTMFKSKKCSKKKYQYLMLPDLNDQELLGGWRSRNLNDTRYICKYLVNYLRKNLRFDRSYESSDEDDLKIRDHYRVFPVKSRFTSMFRRWWLNEKTWGRYDKAELKKLTYLDHAADAIIIANCRPEYVVLAGEKLKLNKMYHQAGKRITPEYEQSKKACIDNLYKLFRMDRRTAEKLLSGHGRLTPIIPNLSEEVDKRLWDKNIYEQFWKDDKDKKSCEELYRENVASLYKGDPKFASSLSMPVISLKPDHKYRGTITGEEAIRVKEIDGKLIKLKRKSISEITAESINSIYTDDKILIDSLKTIFEQADYKDVGDYLKKTNQHFFTTSSGKRVNKVTVIEKVPSRWLRKEIDDNNFSLLNDSSYYCIELYKDSKGDNNLQGIAMSDIVHDRKTKKLYLKPDFNYPDDYYTHVMYIFPGDYLRIKSTSKKSGEQLKFEGYFISVKNVNENSFRFISDNKPCAKDKRVSITKKDIVIKLAVDLMGKVQGENNGKGISCGEPLSLLKEKN

SEQ ID NO: 66 - protein, 1153 aa, Barnesiella intestinihominis
MKNILGLDLGLSSIGWSVIRENSEEQELVAMGSRVVSLTAAELSSFTQGNGVSINSQRTQKRTQRKGYDRYQLRRTLLRNKLDTLGMLPDDSLSYLPKLQLWGLRAKAVTQRIELNELGRVLLHLNQKRGYKSIKSDFSGDKKITDYVKTVKTRYDELKEMRLTIGELFFRRLTENAFFRCKEQVYPRQAYVEEFDCIMNCQRKFYPDILTDETIRCIRDEIIYYQRPLKSCKYLVSRCEFEKRFYLNAAGKKTEAGPKVSPRTSPLFQVCRLWESINNIVVKDRRNEIVFISAEQRAALFDFLNTHEKLKGSDLLKLLGLSKTYGYRLGEQFKTGIQGNKTRVEIERALGNYPDKKRLLQFNLQEESSSMVNTETGEIIPMISLSFEQEPLYRLWHVLYSIDDREQLQSVLRQKFGIDDDEVLERLSAIDLVKAGFGNKSSKAIRRILPFLQLGMNYAEACEAAGYNHSNNYTKAENEARALLDRLPAIKKNELRQPVVEKILNQMVNVVNALMEKYGRFDEIRVELARELKQSKEERSNTYKSINKNQRENEQIAKRIVEYGVPTRSRIQKYKMWEESKHCCIYCGQPVDVGDFLRGFDVEVEHIIPKSLYFDDSFANKVCSCRSCNKEKNNRTAYDYMKSKGEKALSDYVERVNTMYTNNQISKTKWQNLLTPVDKISIDFIDRQLRESQYIARKAKEILTSICYNVTATSGSVTSFLRHVWGWDTVLHDLNFDRYKKVGLTEVIEVNHRGSVIRREQIKDWSKRFDHRHHAIDALTIACTKQAYIQRLNNLRAEEGPDFNKMSLERYIQSQPHFSVAQVREAVDRILVSFRAGKRAVTPGKRYIRKNRKRISVQSVLIPRGALSEESVYGVIHVWEKDEQGHVIQKQRAVMKYPITSINREMLDKEKVVDKRIHRILSGRLAQYNDNPKEAFAKPVYIDKECRIPIRTVRCFAKPAINTLVPLKKDDKGNPVAWVNPGNNHHVAIYRDEDGKYKERTVTFWEAVDRCRVGIPAIVTQPDTIWDNILQRNDISENVLESLPDVKWQFVLSLQQNEMFILGMNEEDYRYAMDQQDYALLNKYLYRVQKLSKSDYSFRYHTETSVEDKYDGKPNLKLSMQMGKLKRVSIKSLLGLNPHKVHISVLGEIKEIS

SEQ ID NO: 67 - protein, 1146 aa, Alicyclobacillus hesperidum
MAYRLGLDIGITSVGWAVVALEKDESGLKPVRIQDLGVRIFDKAEDSKTGASLALPRREARSARRRTRRRRHRLWRVKRLLEQHGILSMEQIEALYAQRTSSPDVYALRVAGLDRCLIAEEIARVLIHIAHRRGFQSNRKSEIKDSDAGKLLKAVQENENLMQSKGYRTVAEMLVSEATKTDAEGKLVHGKKHGYVSNVRNKAGEYRHTVSRQAIVDEVRKIFAAQRALGNDVMSEELEDSYLKILCSQRNFDDGPGGDSPYGHGSVSPDGVRQSIYERMVGSCTFETGEKRAPRSSYSFERFQLLTKVVNLRIYRQQEDGGRYPCELTQTERARVIDCAYEQTKITYGKLRKLLDMKDTESFAGLTYGLNRSRNKTEDTVFVEMKFYHEVRKALQRAGVFIQDLSIETLDQIGWILSVWKSDDNRRKKLSTLGLSDNVIEELLPLNGSKFGHLSLKAIRKILPFLEDGYSYDVACELAGYQFQGKTEYVKQRLLPPLGEGEVTNPVVRRALSQAIKVVNAVIRKHGSPESIHIELARELSKNLDERRKIEKAQKENQKNNEQIKDEIREILGSAHVTGRDIVKYKLFKQQQEFCMYSGEKLDVTRLFEPGYAEVDHIIPYGISFDDSYDNKVLVKTEQNRQKGNRTPLEYLRDKPEQKAKFIALVESIPLSQKKKNHLLMDKRAIDLEQEGFRERNLSDTRYITRALMNHIQAWLLFDETASTRSKRVVCVNGAVTAYMRARWGLTKDRDAGDKHHAADAVVVACIGDSLIQRVTKYDKFKRNALADRNRYVQQVSKSEGITQYVDKETGEVFTWESFDERKFLPNEPLEPWPFFRDELLARLSDDPSKNIRAIGLLTYSETEQIDPIFVSRMPTRKVTGAAHKETIRSPRIVKVDDNKGTEIQVVVSKVALTELKLTKDGEIKDYFRPEDDPRLYNTLRERLVQFGGDAKAAFKEPVYKISKDGSVRTPVRKVKIQEKLTLGVPVHGGRGIAENGGMVRIDVFAKGGKYYFVPIYVADVLKRELPNRLATAHKPYSEWRVVDDSYQFKFSLYPNDAVMIKPSREVDITYKDRKEPVGCRIMYFVSANIASASISLRTHDNSGELEGLGIQGLEVFEKYVVGPLGDTHPVYKERRMPFRVERKMN

SEQ ID NO: 68 - protein, 1138 aa, Acidothermus cellulolyticus
MGGSEVGTVPVTWRLGVDVGERSIGLAAVSYEEDKPKEILAAVSWIHDGGVGDERSGASRLALRGMARRARRLRRFRRARLRDLDMLLSELGWTPLPDKNVSPVDAWLARKRLAEEYVVDETERRRLLGYAVSHMARHRGWRNPWTTIKDLKNLPQPSDSWERTRESLEARYSVSLEPGTVGQWAGYLLQRAPGIRLNPTQQSAGRRAELSNATAFETRLRQEDVLWELRCIADVQGLPEDVVSNVIDAVFCQKRPSVPAERIGRDPLDPSQLRASRACLEFQEYRIVAAVANLRIRDGSGSRPLSLEERNAVIEALLAQTERSLTWSDIALEILKLPNESDLTSVPEEDGPSSLAYSQFAPFDETSARIAEFIAKNRRKIPTFAQWWQEQDRTSRSDLVAALADNSIAGEEEQELLVHLPDAELEALEGLALPSGRVAYSRLTLSGLTRVMRDDGVDVHNARKTCFGVDDNWRPPLPALHEATGHPVVDRNLAILRKFLSSATMRWGPPQSIVVELARGASESRERQAEEEAARRAHRKANDRIRAELRASGLSDPSPADLVRARLLELYDCHCMYCGAPISWENSELDHIVPRTDGGSNRHENLAITCGACNKEKGRRPFASWAETSNRVQLRDVIDRVQKLKYSGNMYWTRDEFSRYKKSVVARLKRRTSDPEVIQSIESTGYAAVALRDRLLSYGEKNGVAQVAVFRGGVTAEARRWLDISIERLFSRVAIFAQSTSTKRLDRRHHAVDAVVLTTLTPGVAKTLADARSRRVSAEFWRRPSDVNRHSTEEPQSPAYRQWKESCSGLGDLLISTAARDSIAVAAPLRLRPTGALHEETLRAFSEHTVGAAWKGAELRRIVEPEVYAAFLALTDPGGRFLKVSPSEDVLPADENRHIVLSDRVLGPRDRVKLFPDDRGSIRVRGGAAYIASFHHARVFRWGSSHSPSFALLRVSLADLAVAGLLRDGVDVFTAELPPWTPAWRYASIALVKAVESGDAKQVGWLVPGDELDFGPEGVTTAAGDLSMFLKYFPERHWVVTGFEDDKRINLKPAFLSAEQAEVLRTERSDRPDTLTEAGEILAQFFPRCWRATVAKVLCHPGLTVIRRTALGQPRWRRGHLPYSWRPWSADPWSGGTP

SEQ ID NO: 69 - protein, 1131 aa, Acidovorax ebreus
MAQHVFGLDIGIASVGWAILGEQRIIDLGVRCFDKAETAKEGDPLNLTRRQARLLRRRLYRRAWRLTQLSRLLKRKGLIADAKLFAKAPSYGDSAWELRRQGLDRLLTPLEWARVIYHQCKHRGFHWTSKAEEAKADSDAEGGRVKQGLAHTKALMQAKNYRSAAEMVLAEFPDAQRNKRGQYDKALSRVLLGEELALLFATQRRLGNPHASDFFEKLILGDGDRKSGLFWQQKPALSGADLLKMLGKCTFEKGEYRAPKASFSVERHVWLTRLNNLRIVVDGRSRPLNEAERQAALLLPYQTETSKYKTLKNAFIKAGLWGDGVRFGGLAYPSQAQIDAEKTKDPEDQFLVKLPAWHELRKAFKAAGHEALWQQISTPALDGDPTLLDQIATVLSVYKDGAEVVQQLRQLALPEPAASIAVLEKISFDKFSSLSLKALRRIVPLMQSGLRYDEAVAQIPEYGHHSQRIEPGAAKHLYLPPFYEAQRKYAGKGDHIGSMQFRDDADIPRNPVVLRALNQARKVVNALIREYGSPIAVNIEMARDLSRPLDERNKVKRAQEEFRDRNDRARSEFERDFGYKPKAAAFEKWMLYREQLGQCAYSQQPLDIQRVLDDHNYAQVDHALPYSRSYDDSKNNKVLVLTHENQNKGNRTAFEYLTSFPDGEDGERWRTFVAWVQGNKAYRMAKRNRLLRKNYGVDESKGFIDRNLNDTRYICKFFKNYVEEHLQLAARADGDTARRCVVVNGQLTAFLRARWGLTKVRGDSDRHHALDAAVVAACTHGMVKALADYSRRKEISFLQEGFPDPETGEILNPAAFDRARQHFPEPWTHFAHELKARLFTDDLAALREDMQRLGSYTTEDLGRLRTLFVSRAPQRRSGGAVHKETIYAQPESLKQQGGVIEKILLTSLKLQDFDKLLNPESNDHFVEPHRNERLYAAIRQRLEQFGGRADKAFGPDNLFHKPDKNNQPTGPVVRSIKLVRGKQTGIPIRGGLAKNDSMLRVDIFTKAGKFHLVPVYVHHRVTGLPNRAIVAFKDEDEWTLIDESFAFLFSVYPNDYVKVTLKKEQQSGYYSGADRSTGAMNLWAHDRAASVGKDGLIRGIGVKTALSVEKFNVDVLGRIYLAPPETRSGLA

SEQ ID NO: 70 - protein, 1119 aa, Lactobacillus coryniformis
MGYRIGLDVGITSTGYAVLKTDKNGLPYKILTLDSVIYPRAENPQTGASLAEPRRIKRGLRRRTRRTKFRKQRTQQLFIHSGLLSKPEIEQILATPQAKYSVYELRVAGLDRRLTNSELFRVLYFFIGHRGFKSNRKAELNPENEADKKQMGQLLNSIEEIRKAIAEKGYRTVGELYLKDPKYNDHKRNKGYIDGYLSTPNRQMLVDEIKQILDKQRELGNEKLTDEFYATYLLGDENRAGIFQAQRDFDEGPGAGPYAGDQIKKMVGKDIFEPTEDRAAKATYTFQYFNLLQKMTSLNYQNTTGDTWHTLNGLDRQAIIDAVFAKAEKPTKTYKPTDFGELRKLLKLPDDARFNLVNYGSLQTQKEIETVEKKTRFVDFKAYHDLVKVLPEEMWQSRQLLDHIGTALTLYSSDKRRRRYFAEELNLPAELIEKLLPLNFSKFGHLSIKSMQNIIPYLEMGQVYSEATTNTGYDFRKKQISKDTIREEITNPVVRRAVTKTIKIVEQIIRRYGKPDGINIELARELGRNFKERGDIQKRQDKNRQTNDKIAAELTELGIPVNGQNIIRYKLHKEQNGVDPYTGDQIPFERAFSEGYEVDHIIPYSISWDDSYTNKVLTSAKCNREKGNRIPMVYLANNEQRLNALTNIADNIIRNSRKRQKLLKQKLSDEELKDWKQRNINDTRFITRVLYNYFRQAIEFNPELEKKQRVLPLNGEVTSKIRSRWGFLKVREDGDLHHAIDATVIAAITPKFIQQVTKYSQHQEVKNNQALWHDAEIKDAEYAAEAQRMDADLFNKIFNGFPLPWPEFLDELLARISDNPVEMMKSRSWNTYTPIEIAKLKPVFVVRLANHKISGPAHLDTIRSAKLFDEKGIVLSRVSITKLKINKKGQVATGDGIYDPENSNNGDKVVYSAIRQALEAHNGSGELAFPDGYLEYVDHGTKKLVRKVRVAKKVSLPVRLKNKAAADNGSMVRIDVFNTGKKFVFVPIYIKDTVEQVLPNKAIARGKSLWYQITESDQFCFSLYPGDMVHIESKTGIKPKYSNKENNTSVVPIKNFYGYFDGADIATASILVRAHDSSYTARSIGIAGLLKFEKYQVDYFGRYHKVHEKKRQLFVKRDE

SEQ ID NO: 71 - protein, 1415 aa, Bergeyella zoohelcum
MKHILGLDLGTNSIGWALIERNIEEKYGKIIGMGSRIVPMGAELSKFEQGQAQTKNADRRTNRGARRLNKRYKQRRNKLIYILQKLDMLPSQIKLKEDFSDPNKIDKITILPISKKQEQLTAFDLVSLRVKALTEKVGLEDLGKIIYKYNQLRGYAGGSLEPEKEDIFDEEQSKDKKNKSFIAFSKIVFLGEPQEEIFKNKKLNRRAIIVETEEGNFEGSTFLENIKVGDSLELLINISASKSGDTITIKLPNKTNWRKKMENIENQLKEKSKEMGREFYISEFLLELLKENRWAKIRNNTILRARYESEFEAIWNEQVKHYPFLENLDKKTLIEIVSFIFPGEKESQKKYRELGLEKGLKYIIKNQVVFYQRELKDQSHLISDCRYEPNEKAIAKSHPVFQEYKVWEQINKLIVNTKIEAGTNRKGEKKYKYIDRPIPTALKEWIFEELQNKKEITFSAIFKKLKAEFDLREGIDFLNGMSPKDKLKGNETKLQLQKSLGELWDVLGLDSINRQIELWNILYNEKGNEYDLTSDRTSKVLEFINKYGNNIVDDNAEETAIRISKIKFARAYSSLSLKAVERILPLVRAGKYFNNDFSQQLQSKILKLLNENVEDPFAKAAQTYLDNNQSVLSEGGVGNSIATILVYDKHTAKEYSHDELYKSYKEINLLKQGDLRNPLVEQIINEALVLIRDIWKNYGIKPNEIRVELARDLKNSAKERATIHKRNKDNQTINNKIKETLVKNKKELSLANIEKVKLWEAQRHLSPYTGQPIPLSDLFDKEKYDVDHIIPISRYFDDSFTNKVISEKSVNQEKANRTAMEYFEVGSLKYSIFTKEQFIAHVNEYFSGVKRKNLLATSIPEDPVQRQIKDTQYIAIRVKEELNKIVGNENVKTTTGSITDYLRNHWGLTDKFKLLLKERYEALLESEKFLEAEYDNYKKDFDSRKKEYEEKEVLFEEQELTREEFIKEYKENYIRYKKNKLIIKGWSKRIDHRHHAIDALIVACTEPAHIKRLNDLNKVLQDWLVEHKSEFMPNFEGSNSELLEEILSLPENERTEIFTQIEKFRAIEMPWKGFPEQVEQKLKEIIISHKPKDKLLLQYNKAGDRQIKLRGQLHEGTLYGISQGKEAYRIPLTKFGGSKFATEKNIQKIVSPFLSGFIANHLKEYNNKKEEAFSAEGIMDLNNKLAQYRNEKGELKPHTPISTVKIYYKDPSKNKKKKDEEDLSLQKLDREKAFNEKLYVKTGDNYLFAVLEGEIKTKKTSQIKRLYDIISFFDATNFLKEEFRNAPDKKTFDKDLLFRQYFEERNKAKLLFTLKQGDFVYLPNENEEVILDKESPLYNQYWGDLKERGKNIYVVQKFSKKQIYFIKHTIADIIKKDVEFGSQNCYETVEGRSIKENCFKLEIDRLGNIVKVIKR

SEQ ID NO: 72 - protein, 1113 aa, Alcanivorax pacificus
MRYRVGLDLGTASVGAAVFSMDEQGNPMELIWHYERLFSEPLVPDMGQLKPKKAARRLARQQRRQIDRRASRLRRIAIVSRRLGIAPGRNDSGVHGNDVPTLRAMAVNERIELGQLRAVLLRMGKKRGYGGTFKAVRKVGEAGEVASGASRLEEEMVALASVQNKDSVTVGEYLAARVEHGLPSKLKVAANNEYYAPEYALFRQYLGLPAIKGRPDCLPNMYALRHQIEHEFERIWATQSQFHDVMKDHGVKEEIRNAIFFQRPLKSPADKVGRCSLQTNLPRAPRAQIAAQNFRIEKQMADLRWGMGRRAEMLNDHQKAVIRELLNQQKELSFRKIYKELERAGCPGPEGKGLNMDRAALGGRDDLSGNTTLAAWRKLGLEDRWQELDEVTQIQVINFLADLGSPEQLDTDDWSCRFMGKNGRPRNFSDEFVAFMNELRMTDGFDRLSKMGFEGGRSSYSIKALKALTEWMIAPHWRETPETHRVDEEAAIRECYPESLATPAQGGRQSKLEPPPLTGNEVVDVALRQVRHTINMMIDDLGSVPAQIVVEMAREMKGGVTRRNDIEKQNKRFASERKKAAQSIEENGKTPTPARILRYQLWIEQGHQCPYCESNISLEQALSGAYTNFEHILPRTLTQIGRKRSELVLAHRECNDEKGNRTPYQAFGHDDRRWRIVEQRANALPKKSSRKTRLLLLKDFEGEALTDESIDEFADRQLHESSWLAKVTTQWLSSLGSDVYVSRGSLTAELRRRWGLDTVIPQVRFESGMPVVDEEGAEITPEEFEKFRLQWEGHRVTREMRTDRRPDKRIDHRHHLVDAIVTALTSRSLYQQYAKAWKVADEKQRHGRVDVKVELPMPILTIRDIALEAVRSVRISHKPDRYPDGRFFEATAYGIAQRLDERSGEKVDWLVSRKSLTDLAPEKKSIDVDKVRANISRIVGEAIRLHISNIFEKRVSKGMTPQQALREPIEFQGNILRKVRCFYSKADDCVRIEHSSRRGHHYKMLLNDGFAYMEVPCKEGILYGVPNLVRPSEAVGIKRAPESGDFIRFYKGDTVKNIKTGRVYTIKQILGDGGGKLILTPVTETKPADLLSAKWGRLKVGGRNIHLLRLCAE

SEQ ID NO: 73 - protein, 1101 aa, Akkermansia muciniphila
MSRSLTFSFDIGYASIGWAVIASASHDDADPSVCGCGTVLFPKDDCQAFKRREYRRLRRNIRSRRVRIERIGRLLVQAQIITPEMKETSGHPAPFYLASEALKGHRTLAPIELWHVLRWYAHNRGYDNNASWSNSLSEDGGNGEDTERVKHAQDLMDKHGTATMAETICRELKLEEGKADAPMEVSTPAYKNLNTAFPRLIVEKEVRRILELSAPLIPGLTAEIIELIAQHHPLTTEQRGVLLQHGIKLARRYRGSLLFGQLIPRFDNRIISRCPVTWAQVYEAELKKGNSEQSARERAEKLSKVPTANCPEFYEYRMARILCNIRADGEPLSAEIRRELMNQARQEGKLTKASLEKAISSRLGKETETNVSNYFTLHPDSEEALYLNPAVEVLQRSGIGQILSPSVYRIAANRLRRGKSVTPNYLLNLLKSRGESGEALEKKIEKESKKKEADYADTPLKPKYATGRAPYARTVLKKVVEEILDGEDPTRPARGEAHPDGELKAHDGCLYCLLDTDSSVNQHQKERRLDTMTNNHLVRHRMLILDRLLKDLIQDFADGQKDRISRVCVEVGKELTTFSAMDSKKIQRELTLRQKSHTDAVNRLKRKLPGKALSANLIRKCRIAMDMNWTCPFTGATYGDHELENLELEHIVPHSFRQSNALSSLVLTWPGVNRMKGQRTGYDFVEQEQENPVPDKPNLHICSLNNYRELVEKLDDKKGHEDDRRRKKKRKALLMVRGLSHKHQSQNHEAMKEIGMTEGMMTQSSHLMKLACKSIKTSLPDAHIDMIPGAVTAEVRKAWDVFGVFKELCPEAADPDSGKILKENLRSLTHLHHALDACVLGLIPYIIPAHHNGLLRRVLAMRRIPEKLIPQVRPVANQRHYVLNDDGRMMLRDLSASLKENIREQLMEQRVIQHVPADMGGALLKETMQRVLSVDGSGEDAMVSLSKKKDGKKEKNQVKASKLVGVFPEGPSKLKALKAAIEIDGNYGVALDPKPVVIRHIKVFKRIMALKEQNGGKPVRILKKGMLIHLTSSKDPKHAGVWRIESIQDSKGGVKLDLQRAHCAVPKNKTHECNWREVDLISLLKKYQMKRYPTSYTGTPR

SEQ ID NO: 74 - protein, 1092 aa, Ilyobacter polytropus
MKYSIGLDIGIASVGWSVINKDKERIEDMGVRIFQKAENPKDGSSLASSRREKRGSRRRNRRKKHRLDRIKNILCESGLVKKNEIEKIYKNAYLKSPWELRAKSLEAKISNKEIAQILLHIAKRRGFKSFRKTDRNADDTGKLLSGIQENKKIMEEKGYLTIGDMVAKDPKFNTHVRNKAGSYLFSFSRKLLEDEVRKIQAKQKELGNTHFTDDVLEKYIEVFNSQRNFDEGPSKPSPYYSEIGQIAKMIGNCTFESSEKRTAKNTWSGERFVFLQKLNNFRIVGLSGKRPLTEEERDIVEKEVYLKKEVRYEKLRKILYLKEEERFGDLNYSKDEKQDKKTEKTKFISLIGNYTIKKLNLSEKLKSEIEEDKSKLDKIIEILTFNKSDKTIESNLKKLELSREDIEILLSEEFSGTLNLSLKAIKKILPYLEKGLSYNEACEKADYDYKNNGIKFKRGELLPVVDKDLIANPVVLRAISQTRKVVNAIIRKYGTPHTIHVEVARDLAKSYDDRQTIIKENKKRELENEKTKKFISEEFGIKNVKGKLLLKYRLYQEQEGRCAYSRKELSLSEVILDESMTDIDHIIPYSRSMDDSYSNKVLVLSGENRKKSNLLPKEYFDRQGRDWDTFVLNVKAMKIHPRKKSNLLKEKFTREDNKDWKSRALNDTRYISRFVANYLENALEYRDDSPKKRVFMIPGQLTAQLRARWRLNKVRENGDLHHALDAAVVAVTDQKAINNISNISRYKELKNCKDVIPSIEYHADEETGEVYFEEVKDTRFPMPWSGFDLELQKRLESENPREEFYNLLSDKRYLGWFNYEEGFIEKLRPVFVSRMPNRGVKGQAHQETIRSSKKISNQIAVSKKPLNSIKLKDLEKMQGRDTDRKLYEALKNRLEEYDDKPEKAFAEPFYKPTNSGKRGPLVRGIKVEEKQNVGVYVNGGQASNGSMVRIDVFRKNGKFYTVPIYVHQTLLKELPNRAINGKPYKDWDLIDGSFEFLYSFYPNDLIEIEFGKSKSIKNDNKLTKTEIPEVNLSEVLGYYRGMDTSTGAATIDTQDGKIQMRIGIKTVKNIKKYQVDVLGNVYKVKREKRQTF

SEQ ID NO: 75 - protein, 1064 aa, unknown
  Cas9 protein sequence of Bradyrhizobium species BTAi1
MKRTSLRAYRLGVDLGANSLGWFVVWLDDHGQPEGLGPGGVRIFPDGRNPQSKQSNAAGRRLARSARRRRDRYLQRRGKLMGLLVKHGLMPADEPARKRLECLDPYGLRAKALDEVLPLHHVGRALFHLNQRRGLFANRAIEQGDKDASAIKAAAGRLQTSMQACGARTLGEFLNRRHQLRATVRARSPVGGDVQARYEFYPTRAMVDAEFEAIWAAQAPHHPTMTAEAHDTIREAIFSQRAMKRPSIGKCSLDPATSQDDVDGFRCAWSHPLAQRFRIWQDVRNLAVVETGPTSSRLGKEDQDKVARALLQTDQLSFDEIRGLLGLPSDARFNLESDRRDHLKGDATGAILSARRHFGPAWHDRSLDRQIDIVALLESALDEAAIIASLGTTHSLDEAAAQRALSALLPDGYCRLGLRAIKRVLPLMEAGRTYAEAASAAGYDHALLPGGKLSPTGYLPYYGQWLQNDVVGSDDERDTNERRWGRLPNPTVHIGIGQLRRVVNELIRWHGPPAEITVELTRDLKLSPRRLAELEREQAENQRKNDKRTSLLRKLGLPASTHNLLKLRLWDEQGDVASECPYTGEAIGLERLVSDDVDIDHLIPFSISWDDSAANKVVCMRYANREKGNRTPFEAFGHRQGRPYDWADIAERAARLPRGKRWRFGPGARAQFEELGDFQARLLNETSWLARVAKQYLAAVTHPHRIHVLPGRLTALLRATWELNDLLPGSDDRAAKSRKDHRHHAIDALVAALTDQALLRRMANAHDDTRRKIEVLLPWPTFRIDLETRLKAMLVSHKPDHGLQARLHEDTAYGTVEHPETEDGANLVYRKTFVDISEKEIDRIRDRRLRDLVRAHVAGERQQGKTLKAAVLSFAQRRDIAGHPNGIRHVRLTKSIKPDYLVPIRDKAGRIYKSYNAGENAFVDILQAESGRWIARATTVFQANQANESHDAPAAQPIMRVFKGDMLRIDHAGAEKFVKIVRLSPSNNLLYLVEHHQAGVFQTRHDDPEDSFRWLFASFDKLREWNAELVRIDTLGQPWRRKRGLETGSEDATRIGWTRPKKWP

SEQ ID NO: 76 - protein, 1062 aa, Ralstonia syzygii
MAEKQHRWGLDIGTNSIGWAVIALIEGRPAGLVATGSRIFSDGRNPKDGSSLAVERRGPRQMRRRRDRYLRRRDRFMQALINVGLMPGDAAARKALVTENPYVLRQRGLDQALTLPEFGRALFHLNQRRGFQSNRKTDRATAKESGKVKNAIAAFRAGMGNARTVGEALARRLEDGRPVRARMVGQGKDEHYELYIAREWIAQEFDALWASQQRFHAEVLADAARDRLRAILLFQRKLLPVPVGKCFLEPNQPRVAAALPSAQRFRLMQELNHLRVMTLADKRERPLSFQERNDLLAQLVARPKCGFDMLRKIVFGANKEAYRFTIESERRKELKGCDTAAKLAKVNALGTRWQALSLDEQDRLVCLLLDGENDAVLADALREHYGLTDAQIDTLLGLSFEDGHMRLGRSALLRVLDALESGRDEQGLPLSYDKAVVAAGYPAHTADLENGERDALPYYGELLWRYTQDAPTAKNDAERKFGKIANPTVHIGLNQLRKLVNALIQRYGKPAQIVVELARNLKAGLEEKERIKKQQTANLERNERIRQKLQDAGVPDNRENRLRMRLFEELGQGNGLGTPCIYSGRQISLQRLFSNDVQVDHILPFSKTLDDSFANKVLAQHDANRYKGNRGPFEAFGANRDGYAWDDIRARAAVLPRNKRNRFAETAMQDWLHNETDFLARQLTDTAYLSRVARQYLTAICSKDDVYVSPGRLTAMLRAKWGLNRVLDGVMEEQGRPAVKNRDDHRHHAIDAVVIGATDRAMLQQVATLAARAREQDAERLIGDMPTPWPNFLEDVRAAVARCVVSHKPDHGPEGGLHNDTAYGIVAGPFEDGRYRVRHRVSLFDLKPGDLSNVRCDAPLQAELEPIFEQDDARAREVALTALAERYRQRKVWLEELMSVLPIRPRGEDGKTLPDSAPYKAYKGDSNYCYELFINERGRWDGELISTFRANQAAYRRFRNDPARFRRYTAGGRPLLMRLCINDYIAVGTAAERTIFRVVKMSENKITLAEHFEGGTLKQRDADKDDPFKYLTKSPGALRDLGARRIFVDLIGRVLDPGIKGD

SEQ ID NO: 77 - protein, 1062 aa, unknown
  Cas9 protein sequence of Treponema species JC4
MIMKLEKWRLGLDLGTNSIGWSVFSLDKDNSVQDLIDMGVRIFSDGRDPKTKEPLAVARRTARSQRKLIYRRKLRRKQVFKFLQEQGLFPKTKEECMTLKSLNPYELRIKALDEKLEPYELGRALFNLAVRRGFKSNRKDGSREEVSEKKSPDEIKTQADMQTHLEKAIKENGCRTITEFLYKNQGENGGIRFAPGRMTYYPTRKMYEEEFNLIRSKQEKYYPQVDWDDIYKAIFYQRPLKPQQRGYCIYENDKERTFKAMPCSQKLRILQDIGNLAYYEGGSKKRVELNDNQDKVLYELLNSKDKVTFDQMRKALCLADSNSFNLEENRDFLIGNPTAVKMRSKNRFGKLWDEIPLEEQDLIIETIITADEDDAVYEVIKKYDLTQEQRDFIVKNTILQSGTSMLCKEVSEKLVKRLEEIADLKYHEAVESLGYKFADQTVEKYDLLPYYGKVLPGSTMEIDLSAPETNPEKHYGKISNPTVHVALNQTRVVVNALIKEYGKPSQIAIELSRDLKNNVEKKAEIARKQNQRAKENIAINDTISALYHTAFPGKSFYPNRNDRMKYRLWSELGLGNKCIYCGKGISGAELFTKEIEIEHILPFSRTLLDAESNLTVAHSSCNAFKAERSPFEAFGTNPSGYSWQEIIQRANQLKNTSKKNKFSPNAMDSFEKDSSFIARQLSDNQYIAKAALRYLKCLVENPSDVWTTNGSMTKLLRDKWEMDSILCRKFTEKEVALLGLKPEQIGNYKKNRFDHRHHAIDAVVIGLTDRSMVQKLATKNSHKGNRIEIPEFPILRSDLIEKVKNIVVSFKPDHGAEGKLSKETLLGKIKLHGKETFVCRENIVSLSEKNLDDIVDEKIKSKVKDYVAKHKGQKIEAVLSDFSKENGIKKVRCVNRVQTPIEITSGKISRYLSPEDYFAAVIWEIPGEKKTFKAQYIRRNEVEKNSKGLNVVKPAVLENGKPHPAAKQVCLLHKDDYLEFSDKGKMYFCRIAGYAATNNKLDIRPVYAVSYCADWINSTNETMLTGYWKPTPTQNWVSVNVLFDKQKARLVTVSPIGRVFRK

SEQ ID NO: 78 - protein, 1059 aa, Wolinella succinogenes
MIERILGVDLGISSLGWAIVEYDKDDEAANRIIDCGVRLFTAAETPKKKESPNKARREARGIRRVLNRRRVRMNMIKKLFLRAGLIQDVDLDGEGGMFYSKANRADVWELRHDGLYRLLKGDELARVLIHIAKHRGYKFIGDDEADEESGKVKKAGVVLRQNFEAAGCRTVGEWLWRERGANGKKRNKHGDYEISIHRDLLVEEVEAIFVAQQEMRSTIATDALKAAYREIAFFVRPMQRIEKMVGHCTYFPEERRAPKSAPTAEKFIAISKFFSTVIIDNEGWEQKIIERKTLEELLDFAVSREKVEFRHLRKFLDLSDNEIFKGLHYKGKPKTAKKREATLFDPNEPTELEFDKVEAEKKAWISLRGAAKLREALGNEFYGRFVALGKHADEATKILTYYKDEGQKRRELTKLPLEAEMVERLVKIGFSDFLKLSLKAIRDILPAMESGARYDEAVLMLGVPHKEKSAILPPLNKTDIDILNPTVIRAFAQFRKVANALVRKYGAFDRVHFELAREINTKGEIEDIKESQRKNEKERKEAADWIAETSFQVPLTRKNILKKRLYIQQDGRCAYTGDVIELERLFDEGYCEIDHILPRSRSADDSFANKVLCLARANQQKTDRTPYEWFGHDAARWNAFETRTSAPSNRVRTGKGKIDRLLKKNFDENSEMAFKDRNLNDTRYMARAIKTYCEQYWVFKNSHTKAPVQVRSGKLTSVLRYQWGLESKDRESHTHHAVDAIIIAFSTQGMVQKLSEYYRFKETHREKERPKLAVPLANFRDAVEEATRIENTETVKEGVEVKRLLISRPPRARVTGQAHEQTAKPYPRIKQVKNKKKWRLAPIDEEKFESFKADRVASANQKNFYETSTIPRVDVYHKKGKFHLVPIYLHEMVLNELPNLSLGTNPEAMDENFFKFSIFKDDLISIQTQGTPKKPAKIIMGYFKNMHGANMVLSSINNSPCEGFTCTPVSMDKKHKDKCKLCPEENRIAGRCLQGFLDYWSQEGLRPPRKEFECDQGVKFALDVKKYQIDPLGYYYEVKQEKRLGTIPQMRSAKKLVKK

SEQ ID NO: 79 - protein, 1059 aa, unknown
  Cas9 protein sequence of Rhodovulum species PH10
MGIRFAFDLGTNSIGWAVWRTGPGVFGEDTAASLDGSGVLIFKDGRNPKDGQSLATMRRVPRQSRKRRDRFVLRRRDLLAALRKAGLFPVDVEEGRRLAATDPYHLRAKALDESLTPHEMGRVIFHLNQRRGFRSNRKADRQDREKGKIAEGSKRLAETLAATNCRTLGEFLWSRHRGTPRTRSPTRIRMEGEGAKALYAFYPTREMVRAEFERLWTAQSRFAPDLLTPERHEEIAGILFRQRDLAPPKIGCCTFEPSERRLPRALPSVEARGIYERLAHLRITTGPVSDRGLTRPERDVLASALLAGKSLTFKAVRKTLKILPHALVNFEEAGEKGLDGALTAKLLSKPDHYGAAWHGLSFAEKDTFVGKLLDEADEERLIRRLVTENRLSEDAARRCASIPLADGYGRLGRTANTEILAALVEETDETGTVVTYAEAVRRAGERTGRNWHHSDERDGVILDRLPYYGEILQRHVVPGSGEPEEKNEAARWGRLANPTVHIGLNQLRKVVNRLIAAHGRPDQIVVELARELKLNREQKERLDRENRKNREENERRTAILAEHGQRDTAENKIRLRLFEEQARANAGIALCPYTGRAIGIAELFTSEVEIDHILPVSLTLDDSLANRVLCRREANREKRRQTPFQAFGATPAWNDIVARAAKLPPNKRWRFDPAALERFEREGGFLGRQLNETKYLSRLAKIYLGKICDPDRVYVTPGTLTGLLRARWGLNSILSDSNFKNRSDHRHHAVDAVVIGVLTRGMIQRIAHDAARAEDQDLDRVFRDVPVPFEDFRDHVRERVSTITVAVKPEHGKGGALHEDTSYGLVPDTDPNAALGNLVVRKPIRSLTAGEVDRVRDRALRARLGALAAPFRDESGRVRDAKGLAQALEAFGAENGIRRVRILKPDASVVTIADRRTGVPYRAVAPGENHHVDIVQMRDGSWRGFAASVFEVNRPGWRPEWEVKKLGGKLVMRLHKGDMVELSDKDGQRRVKVVQQIEISANRVRLSPHNDGGKLQDRHADADDPFRWDLATIPLLKDRGCVAVRVDPIGVVTLRRSNV

SEQ ID NO: 80 - protein, 1052 aa, Aminomonas paucivorans
MIGEHVRGGCLFDDHWTPNWGAFRLPNTVRTFTKAENPKDGSSLAEPRRQARGLRRRLRRKTQRLEDLRRLLAKEGVLSLSDLETLFRETPAKDPYQLRAEGLDRPLSFPEWVRVLYHITKHRGFQSNRRNPVEDGQERSRQEEEGKLLSGVGENERLLREGGYRTAGEMLARDPKFQDHRRNRAGDYSHTLSRSLLLEEARRLFQSQRTLGNPHASSNLEEAFLHLVAFQNPFASGEDIRNKAGHCSLEPDQIRAPRRSASAETFMLLQKTGNLRLIHRRTGEERPLTDKEREQIHLLAWKQEKVTHKTLRRHLEIPEEWLFTGLPYHRSGDKAEEKLFVHLAGIHEIRKALDKGPDPAVWDTLRSRRDLLDSIADTLTFYKNEDEILPRLESLGLSPENARALAPLSFSGTAHLSLSALGKLLPHLEEGKSYTQARADAGYAAPPPDRHPKLPPLEEADWRNPVVFRALTQTRKVVNALVRRYGPPWCIHLETARELSQPAKVRRRIETEQQANEKKKQQAEREFLDIVGTAPGPGDLLKMRLWREQGGFCPYCEEYLNPTRLAEPGYAEMDHILPYSRSLDNGWHNRVLVHGKDNRDKGNRTPFEAFGGDTARWDRLVAWVQASHLSAPKKRNLLREDFGEEAERELKDRNLTDTRFITKTAATLLRDRLTFHPEAPKDPVMTLNGRLTAFLRKQWGLHKNRKNGDLHHALDAAVLAVASRSFVYRLSSHNAAWGELPRGREAENGFSLPYPAFRSEVLARLCPTREEILLRLDQGGVGYDEAFRNGLRPVFVSRAPSRRLRGKAHMETLRSPKWKDHPEGPRTASRIPLKDLNLEKLERMVGKDRDRKLYEALRERLAAFGGNGKKAFVAPFRKPCRSGEGPLVRSLRIFDSGYSGVELRDGGEVYAVADHESMVRVDVYAKKNRFYLVPVYVADVARGIVKNRAIVAHKSEEEWDLVDGSFDFRFSLFPGDLVEIEKKDGAYLGYYKSCHRGDGRLLLDRHDRMPRESDCGTFYVSTRKDVLSMSKYQVDPLGEIRLVGSEKPPFVL

SEQ ID NO: 81 - protein, 1037 aa, Parvibaculum lavamentivorans
MERIFGFDIGTTSIGFSVIDYSSTQSAGNIQRLGVRIFPEARDPDGTPLNQQRRQKRMMRRQLRRRRIRRKALNETLHEAGFLPAYGSADWPVVMADEPYELRRRGLEEGLSAYEFGRAIYHLAQHRHFKGRELEESDTPDPDVDDEKEAANERAATLKALKNEQTTLGAWLARRPPSDRKRGIHAHRNVVAEEFERLWEVQSKFHPALKSEEMRARISDTIFAQRPVFWRKNTLGECRFMPGEPLCPKGSWLSQQRRMLEKLNNLAIAGGNARPLDAEERDAILSKLQQQASMSWPGVRSALKALYKQRGEPGAEKSLKFNLELGGESKLLGNALEAKLADMFGPDWPAHPRKQEIRHAVHERLWAADYGETPDKKRVIILSEKDRKAHREAAANSFVADFGITGEQAAQLQALKLPTGWEPYSIPALNLFLAELEKGERFGALVNGPDWEGWRRTNFPHRNQPTGEILDKLPSPASKEERERISQLRNPTVVRTQNELRKVVNNLIGLYGKPDRIRIEVGRDVGKSKREREEIQSGIRRNEKQRKKATEDLIKNGIANPSRDDVEKWILWKEGQERCPYTGDQIGFNALFREGRYEVEHIWPRSRSFDNSPRNKTLCRKDVNIEKGNRMPFEAFGHDEDRWSAIQIRLQGMVSAKGGTGMSPGKVKRFLAKTMPEDFAARQLNDTRYAAKQILAQLKRLWPDMGPEAPVKVEAVTGQVTAQLRKLWTLNNILADDGEKTRADHRHHAIDALTVACTHPGMTNKLSRYWQLRDDPRAEKPALTPPWDTIRADAEKAVSEIVVSHRVRKKVSGPLHKETTYGDTGTDIKTKSGTYRQFVTRKKIESLSKGELDEIRDPRIKEIVAAHVAGRGGDPKKAFPPYPCVSPGGPEIRKVRLTSKQQLNLMAQTGNGYADLGSNHHIAIYRLPDGKADFEIVSLFDASRRLAQRNPIVQRTRADGASFVMSLAAGEAIMIPEGSKKGIWIVQGVWASGQVVLERDTDADHSTTTRPMPNPILKDDAKKVSIDPIGRVRPSND

SEQ ID NO: 82 - protein, 1035 aa, Puniceispirillum marinum
MRRLGLDLGTNSIGWCLLDLGDDGEPVSIFRTGARIFSDGRDPKSLGSLKATRREARLTRRRRDRFIQRQKNLINALVKYGLMPADEIQRQALAYKDPYPIRKKALDEAIDPYEMGRAIFHINQRRGFKSNRKSADNEAGVVKQSIADLEMKLGEAGARTIGEFLADRQATNDTVRARRLSGTNALYEFYPDRYMLEQEFDTLWAKQAAFNPSLYIEAARERLKEIVFFQRKLKPQEVGRCIFLSDEDRISKALPSFQRFRIYQELSNLAWIDHDGVAHRITASLALRDHLFDELEHKKKLTFKAMRAILRKQGVVDYPVGFNLESDNRDHLIGNLTSCIMRDAKKMIGSAWDRLDEEEQDSFILMLQDDQKGDDEVRSILTQQYGLSDDVAEDCLDVRLPDGHGSLSKKAIDRILPVLRDQGLIYYDAVKEAGLGEANLYDPYAALSDKLDYYGKALAGHVMGASGKFEDSDEKRYGTISNPTVHIALNQVRAVVNELIRLHGKPDEVVIEIGRDLPMGADGKRELERFQKEGRAKNERARDELKKLGHIDSRESRQKFQLWEQLAKEPVDRCCPFTGKMMSISDLFSDKVEIEHLLPFSLTLDDSMANKTVCFRQANRDKGNRAPFDAFGNSPAGYDWQEILGRSQNLPYAKRWRFLPDAMKRFEADGGFLERQLNDTRYISRYTTEYISTIIPKNKIWVVTGRLTSLLRGFWGLNSILRGHNTDDGTPAKKSRDDHRHHAIDAIVVGMTSRGLLQKVSKAARRSEDLDLTRLFEGRIDPWDGFRDEVKKHIDAIIVSHRPRKKSQGALHNDTAYGIVEHAENGASTVVHRVPITSLGKQSDIEKVRDPLIKSALLNETAGLSGKSFENAVQKWCADNSIKSLRIVETVSIIPITDKEGVAYKGYKGDGNAYMDIYQDPTSSKWKGEIVSRFDANQKGFIPSWQSQFPTARLIMRLRINDLLKLQDGEIEEIYRVQRLSGSKILMAPHTEANVDARDRDKNDTFKLTSKSPGKLQSASARKVHISPTGLIREG

SEQ ID NO: 83 - protein, 1024 aa, Helicobacter mustelae
MIRTLGIDIGIASIGWAVIEGEYTDKGLENKEIVASGVRVFTKAENPKNKESLALPRTLARSARRRNARKKGRIQQVKHYLSKALGLDLECFVQGEKLATLFQTSKDFLSPWELRERALYRVLDKEELARVILHIAKRRGYDDITYGVEDNDSGKIKKAIAENSKRIKEEQCKTIGEMMYKLYFQKSLNVRNKKESYNRCVGRSELREELKTIFQIQQELKSPWVNEELIYKLLGNPDAQSKQEREGLIFYQRPLKGFGDKIGKCSHIKKGENSPYRACKHAPSAEEFVALTKSINFLKNLTNRHGLCFSQEDMCVYLGKILQEAQKNEKGLTYSKLKLLLDLPSDFEFLGLDYSGKNPEKAVFLSLPSTFKLNKITQDRKTQDKIANILGANKDWEAILKELESLQLSKEQIQTIKDAKLNFSKHINLSLEALYHLLPLMREGKRYDEGVEILQERGIFSKPQPKNRQLLPPLSELAKEESYFDIPNPVLRRALSEFRKVVNALLEKYGGFHYFHIELTRDVCKAKSARMQLEKINKKNKSENDAASQLLEVLGLPNTYNNRLKCKLWKQQEEYCLYSGEKITIDHLKDQRALQIDHAFPLSRSLDDSQSNKVLCLTSSNQEKSNKTPYEWLGSDEKKWDMYVGRVYSSNFSPSKKRKLTQKNFKERNEEDFLARNLVDTGYIGRVTKEYIKHSLSFLPLPDGKKEHIRIISGSMTSTMRSFWGVQEKNRDHHLHHAQDAIIIACIEPSMIQKYTTYLKDKETHRLKSHQKAQILREGDHKLSLRWPMSNFKDKIQESIQNIIPSHHVSHKVTGELHQETVRTKEFYYQAFGGEEGVKKALKFGKIREINQGIVDNGAMVRVDIFKSKDKGKFYAVPIYTYDFAIGKLPNKAIVQGKKNGIIKDWLEMDENYEFCFSLFKNDCIKIQTKEMQEAVLAIYKSTNSAKATIELEHLSKYALKNEDEEKMFTDTDKEKNKTMTRESCGIQGLKVFQKVKLSVLGEVLEHKPRNRQNIALKTTPKHV

SEQ ID NO: 84 - protein, 1021 aa, Clostridium cellulolyticum
MKYTLGLDVGIASVGWAVIDKDNNKIIDLGVRCFDKAEESKTGESLATARRIARGMRRRISRRSQRLRLVKKLFVQYEIIKDSSEFNRIFDTSRDGWKDPWELRYNALSRILKPYELVQVLTHITKRRGFKSNRKEDLSTTKEGVVITSIKNNSEMLRTKNYRTIGEMIFMETPENSNKRNKVDEYIHTIAREDLLNEIKYIFSIQRKLGSPFVTEKLEHDFLNIWEFQRPFASGDSILSKVGKCTLLKEELRAPTSCYTSEYFGLLQSINNLVLVEDNNTLTLNNDQRAKIIEYAHFKNEIKYSEIRKLLDIEPEILFKAHNLTHKNPSGNNESKKFYEMKSYHKLKSTLPTDIWGKLHSNKESLDNLFYCLTVYKNDNEIKDYLQANNLDYLIEYIAKLPTFNKFKHLSLVAMKRIIPFMEKGYKYSDACNMAELDFTGSSKLEKCNKLTVEPIIENVTNPVVIRALTQARKVINAIIQKYGLPYMVNIELAREAGMTRQDRDNLKKEHENNRKAREKISDLIRQNGRVASGLDILKWRLWEDQGGRCAYSGKPIPVCDLLNDSLTQIDHIYPYSRSMDDSYMNKVLVLTDENQNKRSYTPYEVWGSTEKWEDFEARIYSMHLPQSKEKRLLNRNFITKDLDSFISRNLNDTRYISRFLKNYIESYLQFSNDSPKSCVVCVNGQCTAQLRSRWGLNKNREESDLHHALDAAVIACADRKIIKEITNYYNERENHNYKVKYPLPWHSFRQDLMETLAGVFISRAPRRKITGPAHDETIRSPKHFNKGLTSVKIPLTTVTLEKLETMVKNTKGGISDKAVYNVLKNRLIEHNNKPLKAFAEKIYKPLKNGTNGAIIRSIRVETPSYTGVFRNEGKGISDNSLMVRVDVFKKKDKYYLVPIYVAHMIKKELPSKAIVPLKPESQWELIDSTHEFLFSLYQNDYLVIKTKKGITEGYYRSCHRGTGSLSLMPHFANNKNVKIDIGVRTAISIEKYNVDILGNKSIVKGEPRRGMEKYNSFKSN

SEQ ID NO: 85 - protein, 1011 aa, unknown
  Cas9 protein sequence of uncultured delta proteobacterium HF0070 07E19
MSSKAIDSLEQLDLFKPQEYTLGLDLGIKSIGWAILSGERIANAGVYLFETAEELNSTGNKLISKAAERGRKRRIRRMLDRKARRGRHIRYLLEREGLPTDELEEVVVHQSNRTLWDVRAEAVERKLTKQELAAVLFHLVRHRGYFPNTKKLPPDDESDSADEEQGKINRATSRLREELKASDCKTIGQFLAQNRDRQRNREGDYSNLMARKLVFEEALQILAFQRKQGHELSKDFEKTYLDVLMGQRSGRSPKLGNCSLIPSELRAPSSAPSTEWFKFLQNLGNLQISNAYREEWSIDAPRRAQIIDACSQRSTSSYWQIRRDFQIPDEYRFNLVNYERRDPDVDLQEYLQQQERKTLANFRNWKQLEKIIGTGHPIQTLDEAARLITLIKDDEKLSDQLADLLPEASDKAITQLCELDFTTAAKISLEAMYRILPHMNQGMGFFDACQQESLPEIGVPPAGDRVPPFDEMYNPVVNRVLSQSRKLINAVIDEYGMPAKIRVELARDLGKGRELRERIKLDQLDKSKQNDQRAEDFRAEFQQAPRGDQSLRYRLWKEQNCTCPYSGRMIPVNSVLSEDTQIDHILPISQSFDNSLSNKVLCFTEENAQKSNRTPFEYLDAADFQRLEAISGNWPEAKRNKLLHKSFGKVAEEWKSRALNDTRYLTSALADHLRHHLPDSKIQTVNGRITGYLRKQWGLEKDRDKHTHHAVDAIVVACTTPAIVQQVTLYHQDIRRYKKLGEKRPTPWPETFRQDVLDVEEEIFITRQPKKVSGGIQTKDTLRKHRSKPDRQRVALTKVKLADLERLVEKDASNRNLYEHLKQCLEESGDQPTKAFKAPFYMPSGPEAKQRPILSKVTLLREKPEPPKQLTELSGGRRYDSMAQGRLDIYRYKPGGKRKDEYRVVLQRMIDLMRGEENVHVFQKGVPYDQGPEIEQNYTFLFSLYFDDLVEFQRSADSEVIRGYYRTFNIANGQLKISTYLEGRQDFDFFGANRLAHFAKVQVNLLGKVIK

SEQ ID NO: 86 - protein, 1132 aa, Nitratifractor salsuginis
MKKILGVDLGITSFGYAILQETGKDLYRCLDNSVVMRNNPYDEKSGESSQSIRSTQKSMRRLIEKRKKRIRCVAQTMERYGILDYSETMKINDPKNNPIKNRWQLRAVDAWKRPLSPQELFAIFAHMAKHRGYKSIATEDLIYELELELGLNDPEKESEKKADERRQVYNALRHLEELRKKYGGETIAQTIHRAVEAGDLRSYRNHDDYEKMIRREDIEEEIEKVLLRQAELGALGLPEEQVSELIDELKACITDQEMPTIDESLFGKCTFYKDELAAPAYSYLYDLYRLYKKLADLNIDGYEVTQEDREKVIEWVEKKIAQGKNLKKITHKDLRKILGLAPEQKIFGVEDERIVKGKKEPRTFVPFFFLADIAKFKELFASIQKHPDALQIFRELAEILQRSKTPQEALDRLRALMAGKGIDTDDRELLELFKNKRSGTRELSHRYILEALPLFLEGYDEKEVQRILGFDDREDYSRYPKSLRHLHLREGNLFEKEENPINNHAVKSLASWALGLIADLSWRYGPFDEIILETTRDALPEKIRKEIDKAMREREKALDKIIGKYKKEFPSIDKRLARKIQLWERQKGLDLYSGKVINLSQLLDGSADIEHIVPQSLGGLSTDYNTIVTLKSVNAAKGNRLPGDWLAGNPDYRERIGMLSEKGLIDWKKRKNLLAQSLDEIYTENTHSKGIRATSYLEALVAQVLKRYYPFPDPELRKNGIGVRMIPGKVTSKTRSLLGIKSKSRETNFHHAEDALILSTLTRGWQNRLHRMLRDNYGKSEAELKELWKKYMPHIEGLTLADYIDEAFRRFMSKGEESLFYRDMFDTIRSISYWVDKKPLSASSHKETVYSSRHEVPTLRKNILEAFDSLNVIKDRHKLTTEEFMKRYDKEIRQKLWLHRIGNTNDESYRAVEERATQIAQILTRYQLMDAQNDKEIDEKFQQALKELITSPIEVTGKLLRKMRFVYDKLNAMQIDRGLVETDKNMLGIHISKGPNEKLIFRRMDVNNAHELQKERSGILCYLNEMLFIFNKKGLIHYGCLRSYLEKGQGSKYIALFNPRFPANPKAQPSKFTSDSKIKQVGIGSATGIIKAHLDLDGHVRSYEVFGTLPEGSIEWFKEESGYGRVEDDPHH

SEQ ID NO: 87 - protein, 1105 aa, Actinomyces coleocanis
MDNKNYRIGIDVGLNSIGFCAVEVDQHDTPLGFLNLSVYRHDAGIDPNGKKTNTTRLAMSGVARRTRRLFRKRKRRLAALDRFIEAQGWTLPDHADYKDPYTPWLVRAELAQTPIRDENDLHEKLAIAVRHIARHRGWRSPWVPVRSLHVEQPPSDQYLALKERVEAKTLLQMPEGATPAEMVVALDLSVDVNLRPKNREKTDTRPENKKPGFLGGKLMQSDNANELRKIAKIQGLDDALLRELIELVFAADSPKGASGELVGYDVLPGQHGKRRAEKAHPAFQRYRIASIVSNLRIRHLGSGADERLDVETQKRVFEYLLNAKPTADITWSDVAEEIGVERNLLMGTATQTADGERASAKPPVDVTNVAFATCKIKPLKEWWLNADYEARCVMVSALSHAEKLTEGTAAEVEVAEFLQNLSDEDNEKLDSFSLPIGRAAYSVDSLERLTKRMIENGEDLFEARVNEFGVSEDWRPPAEPIGARVGNPAVDRVLKAVNRYLMAAEAEWGAPLSVNIEHVREGFISKRQAVEIDRENQKRYQRNQAVRSQIADHINATSGVRGSDVTRYLAIQRQNGECLYCGTAITFVNSEMDHIVPRAGLGSTNTRDNLVATCERCNKSKSNKPFAVWAAECGIPGVSVAEALKRVDFWIADGFASSKEHRELQKGVKDRLKRKVSDPEIDNRSMESVAWMARELAHRVQYYFDEKHTGTKVRVFRGSLTSAARKASGFESRVNFIGGNGKTRLDRRHHAMDAATVAMLRNSVAKTLVLRGNIRASERAIGAAETWKSFRGENVADRQIFESWSENMRVLVEKFNLALYNDEVSIFSSLRLQLGNGKAHDDTITKLQMHKVGDAWSLTEIDRASTPALWCALTRQPDFTWKDGLPANEDRTIIVNGTHYGPLDKVGIFGKAAASLLVRGGSVDIGSAIHHARIYRIAGKKPTYGMVRVFAPDLLRYRNEDLFNVELPPQSVSMRYAEPKVREAIREGKAEYLGWLVVGDELLLDLSSETSGQIAELQQDFPGTTHWTVAGFFSPSRLRLRPVYLAQEGLGEDVSEGSKSIIAGQGWRPAVNKVFGSAMPEVIRRDGLGRKRRFSYSGLPVSWQG

SEQ ID NO: 88 - protein, 25 aa, Lactobacillus apis
RNVLPKKFSQSRDISNKILVIKSDN

SEQ ID NO: 89 - protein, 25 aa, Artificial sequence
  Cas9 HNH domain consensus sequence
  misc_feature (8)..(8): Xaa can be any naturally occurring amino acid
  misc_feature (10)..(10): Xaa can be any naturally occurring amino acid
  misc_feature (14)..(15): Xaa can be any naturally occurring amino acid
  misc_feature (21)..(24): Xaa can be any naturally occurring amino acid
DHIIPRSXSXDDSXXNKVLVXXXXN

SEQ ID NO: 90 - protein, 11 aa, Lactobacillus apis
VGLSLEPDAVG

SEQ ID NO: 91 - protein, 11 aa, Artificial sequence
  Cas9 RuvC  domain (subdomain-1) consensus sequence
LGLDIGTNSVG

SEQ ID NO: 92 - protein, 25 aa, Lactobacillus apis
KIVKEIVSCAGHNAPSQIVLSKPII

SEQ ID NO: 93 - protein, 24 aa, Artificial sequence
  Cas9 RuvC domain (subdomain-2) consensus sequence
  misc_feature (9)..(9): Xaa can be any naturally occurring amino acid
  misc_feature (12)..(13): Xaa can be any naturally occurring amino acid
  misc_feature (15)..(16): Xaa can be any naturally occurring amino acid
  misc_feature (18)..(18): Xaa can be any naturally occurring amino acid
KVVNAIIKXYGXXPXXIXIELARE

SEQ ID NO: 94 - protein, 10 aa, Lactobacillus apis
YNGMDAYLNA

SEQ ID NO: 95 - protein, 10 aa, Artificial sequence
  Cas9 RuvC domain (subdomain-3) consensus sequence
  misc_feature (4)..(4): Xaa can be any naturally occurring amino acid
  misc_feature (7)..(7): Xaa can be any naturally occurring amino acid
HHAXDAXVIA

SEQ ID NO: 96 - DNA, 8221 bp, Lactobacillus apis
taccaaaaaagacctggggaattcatccctgggtcttttttgtttaccggttttgattttgtctttgattagattgataaggatagcgtctgtaataatagtacctggtattattccggtagtaatacgttcttgattggttataaggcacacgaggtgttcttcttttaggtagcttaggagcatggcctttaacatataactcaccgttccgagttaccacgctatcgggtttatcccagtctctgttagcaacttctctcatcaggtaagacatcatttcacgatataatacctgagctgcattttggccattgccactaatttggccgtctttcaagttgtcatagccagaccaaacgctcattacatagtttttagtgtaaccaacaaaccaactatctttaggggtcccttggtagctagggtaagcctttagttcttcattagagtacttaactgtaccagttttaccggcctgatagacatcctttatttttgcttgtgtacccgatcctttagttattacgcctttaagcatatctgtaatcatataagcagtagagtctttcatgaccctggtaccatgtgcatcatagttttgaataattccatcaggagtttctattttcgaaacaaattgaggtttgtgatagatgccgtcatcagctaaggccgaataagcaccagccatttgaatagaagatgcattagcaccaattgctaccgatagaccttgtttttgctcgatgttgatgcccattcttttcgcaaattttgatgcgcgtattaaaccaactgtttctaaagtcctaaccgcaggaacgtttctcgactgttctaaggcatatctcatagacacaggtcctaagtacctattgtcccaatcgtaaagctgtatgttggttccagcgtacgtatagggcgtatctaatagtgattgcgctgtagaccaatgtttatattcaatggccggagcataatctaatattggcttgatacttgaaccggttgagcgtgtagtttgcgctgctcggtttaagccgagctgcacgttcggcaaatgccggccacctattattgctaatacatgcccgttagtagggtcaataattgtagaaccaacctgcattttcttattagtaaaaggaatcttggtgccattagccaaatcataaagatgattttgtgcgtcttggtcgatattaactgtgatttttaagttggaagtgtaagggtcaaatcccttttcctttacctcgttaacagcttccttgatataaggatcatcaatttttctagtcaagctaaagtcatcagcatgttttttaactaagccgtcagtgatgctcgtatttaatgcttgccggtattgatacttggttattttgccattgttaaacatagcggccagaacaatatccctacgatattttgcgcttgagggatgcaaataagggtcgtagacagtaggggcgttaggcatccctgctaaaagggcagtttgggacaaatttagttccgaaacgtccttatcaaagtagtaattagcggccgtgccaataccgtagttgttatagttcatatacactttgttgatgtagaactcaagaatctgttctttcgggtattctcggcttatttgcatggccaaccatgcttcctgggctttacgtctcagtgtcctttgggatgcatccgttgaaaatactgatagtttgactaactgttgtgtaatacttgaaccaccagaagatatgtcgtggccaatgatgttatcagcaaaagagccaacaatccgaataggatctatgccaagaggctcgtgatagaaacgtttgtcttcaaccgaaacaatagcatcttttaattgctgtggaatttcgctacttttcaagtaatttctcttatctgagccaagtgacagtaatagttttccgtcagtcgtatagagagaagaagagccgccagactgtagcttggccgtggaaataacaggggcatcttttgcatagtaggcgaaaagacctattccggaaagtacggccaacatcaacaagaagaaaataaagctaagaatcttttttaaccaattactagcggaagtatgattttggtcaactctagacctatgctcagacacgtcattatcgaaatcatcgtaaaattcatcttcgtccctggtgtcatactcagtgacttgtttactttcttcactgtctgaagaaaaattgtaaacatctaatggtgagctttttatgtccttattttttttcatattattcctttacataacctattgcttactttttacaggataaatgaaagctggccaaaaaacagaaatattcaaaaaaccggaaaatgggctaaatttgcatccaaataacggtatattaaagtctagagaaaatctgatttagaaaatattttttgttttaatagtattaatacgaaaaaaggtgacgaaacggccacaaaaaagtaatctttaactaggagaaaaaatatgatgaaaaagaataatgactatatagttggcttaagcttagaaccagatgctgttggttttgcagctattgataaaaagaataagctaatctctttaaagggtaaaaatgtaattggagttacaacgttccaagagggtcaaacagcagaagaaagaagaactagtagaagcgctagaagacttaatcatcgcaaaaaacgcagaattaaatttttggaagagattttcgctgaagaaattgccaaagttgatccgggtttttttgtaagacagcacaattcttgggtatcacctcttgataaggaaagaactgccaacccagcaattattttcccaacaaagtcagaggaaaaagatttttacaaagcatatcctactgtctatcatttacgccaagctttaatgactgagaacaagaagtttgatttgagagaaatctatatcgctatgcatagtattatcaaaagacgtggcaactttttgtacagcgtttcagctcaaagcttcgatacgtccaaaattaacgtcagaggggcattagaaactattaatgataactaccaggcattcaagtcccagggcttaacatgctgtgaactggcagttgaaaatgctgagaagatagaagacgtcattaaaggtgttgacgaagataaaaccatctttactagggaaaaaataaagaaaacagctaaactattggctacggataagcctgataaagcagctcaaaagatgtataagcaacttgcaactgctattttcggtttcaaagcacaatttgatgttattcttggcgaaagcatcgataaagcagaaaagcctaactggtctttaaaactaagtgatgaggactacgaagataagcttgaagctatttcaggaagtttaaacgatgaacaacaagctattgtaaaagagattcaaagcttatatacctctattgttttaaattctattgtacctgacgggcaaactatttctgagtctatgattcagacgtataatcaacataaaagagaccttattttgcttagaaaagcaacagctgatcaagaggacccgaagaaagctgaaaagctaaagttggcatatgatctatatattaataatagaagtcatggcaaagtattagcagcaaaaaaggcctttaataaaaataagaagcttaccactgaagaattttacaaacaagtaaagagtaacttgcctgaaaattcggacaattcagctgaaatattaactctgatagaaaacaatgagtttttaccagtcttaagatcaagaaaaaatacaagtattccttatcagctacagcaaaaggaactagatttaattattaaaaatcaaagcaaatactatccgttcctagcagaagaaaatcctgtcaaggaacacagaaagcaggctccatacaaacttgatgaattaattagatttaagattccttactatgtaggaccactaattaccgaagcggatcaaaaatccactactggaaaagatttttcctggctcgttcgaagcactccaaatgaccatgctcagataacaccatggaactttaatgaaaaagtggacattgctgctactgctaataagtttattcgaaaaatgactgttaaagatacctacatactcggagaagatgttttaccggcaaaaagtttaatttatcaaagatttgaagtcttaaacgaacttaatgggcttaaagtaaatgataaaaaactgtctgtggaaactaagcaagatatttacaaagacttgttccaatcgaaaattacggttaatgagtctgatcttgtagattacctgcatcaacaaaaagggtacagcaaagtcgaaattgcaggcctaactccggtagggaaaactttcagatttaattcatccctctcaagctatattcattttagaaagctaggcctttttgataaacagctggatgatgcaaagtaccaaaaggacttcgaaaaaataattgaatgggcaagcatattcaacgataaaaaaatttatcagcaaaagctaagagaaattacctggctgtctgaaaaacagttcaaatcgattgccaattggacacttaatggttggggaagactttctaaacgattattgacagagctgtatgatgaaaacggacaaaatataatcgaaaggctctgggacagtaaacagaactttcagcaaattattacctctgctggctttaaaaaagaaattgatatagctaatgaagatatggccaagtctactgatttagaagatattctagctgaagcttacacaacaccatcaaataagaaaactgttagaaaagcttccaaaatagtcaaagaaatagttagctgtgccggccataatgcaccttcgcaaattgttttgtccaaaccaattattaatcaaaatccttatgacttatcaaggaataggggaaaggaactacttaaaaaatacgagcaagctactagctctttaattaataaagagttagttaaagaactggaagactgtaatgccaacagacttctatctagtgacaagtactatctttacttttctcaagcaggtagggatgcacttacgggagaaaagattccatacagcgaggtcaaatcctgtgtggtaagaaacgtgttgccaaagaaattttctcaaagcagagatatttcgaacaaaattctggttattaaatctgataataatgcaaaaatagagctaacaaaagagtgttcttctagaataattccagatattgatattactgttgggcacatgtggagcgaatggcaagccgatgagttaattaataaagctaagctagataacctttacgttgatccagataacttacaagatttcgagcaaaataagtatcttggaaaagaattaagtgtaaagtcagcaatagttaaattgctagcagtagtcctacataaactctacccaaaaacagaaattattctgataaatagtcaatatccaaaggctttacgagaaaggttggacctataccgcaatacccaggtaaacgactactataacggaatggacgcatatttgaatgctgtatgtggtaatttcttataccaggtatatcctaaattcagatcgtacatggtatatggtcaatacgacatatttaatggaaaagggtctctgaaaaatttaaagcagttcaatctggtttggccattacttcaaaagaatgatgcaaagcaaaaaaatgcaggaaaaatttatgaatcgggaacagataaggtattattcgatagacagaatgacttctatgctccgctaataagggcatacaactttaaaataatgctgttttcgcaggaaacttatactgaagacgaagcgatgactaaggctacaatatatcctcgcgctgatcgtgacaaggcaggcactaggacctcattggtccctaagaagaagggacttgacccagaaatatacggtgggttttctaatagcaaaaattcatttatggttattgtaaaaattaaaacggccaaagaagatacttataaagctatacctatagctatgcggtatcgtgatacgttagaaaaagccaaaaagaataaaacttatgacgaaactctacgttctatcgtcgaaccggtagtagcaaccacaagggggtacagaggatttgatattatcgtaaaccacttgaatttcaatcaagaaatggtaaatcaaacgtatggtaattttatccttagcaaggctacttatatgtacaatggtaaccagatcgttctctcaccagatgctatgcgtatcttaactggtaaacttgaagaaaaagaagatgaagatagttcacttgtaaaagtttatgacgaaatcctagaacaagttgataaatatttacctctttttaatatgagaagctataatcaaaaactacatgatgcacgaaaagtctttgaaaaactcgatgtacgtaaaaagcggtcaactttatcctcaattttaagagggctgcattgtaattcttcctcatctgatataaaagaacttggaataggaacaggatttggattcttccaaaaacaaagtggaataccattaacaagcgatacgctaattgtttttaaatctattactggattaaggaggagaaaggtaagcctttcagacttagaacagtaaaaaagaagcaccaaaagtctttggtgcttttttgatgctttaaataatccactaatttgtaaacacaaaaaagcccctgccataaggctgaggcggtacagtaataactgcgtttaaacttgtattaaaaataccttgcttgaatctaaattacctatgttcaaaacagatatgaatatctatgatttgccataggtctagaacccaacatgctccattattactttactaaccgttatgtatatccttacataaagaagtaaggtaatatactaatctaattaaattatagcattagtcactaacagtataaatgctgatgaaaagtttacgagcataaataataaacttgttattttaacgtgacttacaaagaagacaaataatctaataatatcagtaaagtagagcttttcgtgaattccagagaagacaaatttagtggattacctcggataattttaaatagaaaatttagacgttatataaaaatcgaattactaataactatctatggtatacagaagtaacagattttaagtatgcattagactgtagcaaatgaaaatactaataaaaaagtataggactaaaaaagcctctgccataaggctgaggcggtacagtaattactgcgtttaatctttgcattaaaaatacatcgcttgattctaaagcacctatacgccaaagggattatgtatatccttacttcgacataggtctagaactagacagacgcgtattaccgtgaacacgtaaacccttgatttgagaaaaaacgtgacaaattaaactaattaaattatagcattagtcgaccggaaagataaatgctgcctaaatttttgaaataaaaaacccctgccatagggctgaggcgatacagtaacgactgtgtttaaactcgatataaaaaacaccttgtttgattctaaataacctatactcaaaaatgatatgtacatcaatgcttgccataaatatgtgacaaaataagctaactagattatagcactagtcggcaggaaagataaatgctgtctaaatttttgaaataaaaaaagcccctgccatagggctgaggcgttacagtaagaactgtgtttatactttgcgttaaaaacacgatgactgattctaaataacctatgcagaaaactgacatgtacatccatagtttgccataggtctagaactaaatagtttacttaacctaattcccttttaatttgtatatccattgtttaccatggggctagaagtatatccatttataattttgtaataaactaatctaataaaattatagcatttgtcgaaagtaagataaatactgccggaaatttttgaaataaaaaagcctctgccatagggctgaggcggtacagtaataactgcgtttatacttcgcgttaaaaaacacgttgtttgattctaaataatctatattcaaaaatgatatgtacatcaatgctttgtcctaggtctagaattaattataaactatttctcaaaaaatgagagatatgtaca

SEQ ID NO: 97 - DNA, 4173 bp, Lactobacillus apis
atgatgaaaaagaataatgactatatagttggcttaagcttagaaccagatgctgttggttttgcagctattgataaaaagaataagctaatctctttaaagggtaaaaatgtaattggagttacaacgttccaagagggtcaaacagcagaagaaagaagaactagtagaagcgctagaagacttaatcatcgcaaaaaacgcagaattaaatttttggaagagattttcgctgaagaaattgccaaagttgatccgggtttttttgtaagacagcacaattcttgggtatcacctcttgataaggaaagaactgccaacccagcaattattttcccaacaaagtcagaggaaaaagatttttacaaagcatatcctactgtctatcatttacgccaagctttaatgactgagaacaagaagtttgatttgagagaaatctatatcgctatgcatagtattatcaaaagacgtggcaactttttgtacagcgtttcagctcaaagcttcgatacgtccaaaattaacgtcagaggggcattagaaactattaatgataactaccaggcattcaagtcccagggcttaacatgctgtgaactggcagttgaaaatgctgagaagatagaagacgtcattaaaggtgttgacgaagataaaaccatctttactagggaaaaaataaagaaaacagctaaactattggctacggataagcctgataaagcagctcaaaagatgtataagcaacttgcaactgctattttcggtttcaaagcacaatttgatgttattcttggcgaaagcatcgataaagcagaaaagcctaactggtctttaaaactaagtgatgaggactacgaagataagcttgaagctatttcaggaagtttaaacgatgaacaacaagctattgtaaaagagattcaaagcttatatacctctattgttttaaattctattgtacctgacgggcaaactatttctgagtctatgattcagacgtataatcaacataaaagagaccttattttgcttagaaaagcaacagctgatcaagaggacccgaagaaagctgaaaagctaaagttggcatatgatctatatattaataatagaagtcatggcaaagtattagcagcaaaaaaggcctttaataaaaataagaagcttaccactgaagaattttacaaacaagtaaagagtaacttgcctgaaaattcggacaattcagctgaaatattaactctgatagaaaacaatgagtttttaccagtcttaagatcaagaaaaaatacaagtattccttatcagctacagcaaaaggaactagatttaattattaaaaatcaaagcaaatactatccgttcctagcagaagaaaatcctgtcaaggaacacagaaagcaggctccatacaaacttgatgaattaattagatttaagattccttactatgtaggaccactaattaccgaagcggatcaaaaatccactactggaaaagatttttcctggctcgttcgaagcactccaaatgaccatgctcagataacaccatggaactttaatgaaaaagtggacattgctgctactgctaataagtttattcgaaaaatgactgttaaagatacctacatactcggagaagatgttttaccggcaaaaagtttaatttatcaaagatttgaagtcttaaacgaacttaatgggcttaaagtaaatgataaaaaactgtctgtggaaactaagcaagatatttacaaagacttgttccaatcgaaaattacggttaatgagtctgatcttgtagattacctgcatcaacaaaaagggtacagcaaagtcgaaattgcaggcctaactccggtagggaaaactttcagatttaattcatccctctcaagctatattcattttagaaagctaggcctttttgataaacagctggatgatgcaaagtaccaaaaggacttcgaaaaaataattgaatgggcaagcatattcaacgataaaaaaatttatcagcaaaagctaagagaaattacctggctgtctgaaaaacagttcaaatcgattgccaattggacacttaatggttggggaagactttctaaacgattattgacagagctgtatgatgaaaacggacaaaatataatcgaaaggctctgggacagtaaacagaactttcagcaaattattacctctgctggctttaaaaaagaaattgatatagctaatgaagatatggccaagtctactgatttagaagatattctagctgaagcttacacaacaccatcaaataagaaaactgttagaaaagcttccaaaatagtcaaagaaatagttagctgtgccggccataatgcaccttcgcaaattgttttgtccaaaccaattattaatcaaaatccttatgacttatcaaggaataggggaaaggaactacttaaaaaatacgagcaagctactagctctttaattaataaagagttagttaaagaactggaagactgtaatgccaacagacttctatctagtgacaagtactatctttacttttctcaagcaggtagggatgcacttacgggagaaaagattccatacagcgaggtcaaatcctgtgtggtaagaaacgtgttgccaaagaaattttctcaaagcagagatatttcgaacaaaattctggttattaaatctgataataatgcaaaaatagagctaacaaaagagtgttcttctagaataattccagatattgatattactgttgggcacatgtggagcgaatggcaagccgatgagttaattaataaagctaagctagataacctttacgttgatccagataacttacaagatttcgagcaaaataagtatcttggaaaagaattaagtgtaaagtcagcaatagttaaattgctagcagtagtcctacataaactctacccaaaaacagaaattattctgataaatagtcaatatccaaaggctttacgagaaaggttggacctataccgcaatacccaggtaaacgactactataacggaatggacgcatatttgaatgctgtatgtggtaatttcttataccaggtatatcctaaattcagatcgtacatggtatatggtcaatacgacatatttaatggaaaagggtctctgaaaaatttaaagcagttcaatctggtttggccattacttcaaaagaatgatgcaaagcaaaaaaatgcaggaaaaatttatgaatcgggaacagataaggtattattcgatagacagaatgacttctatgctccgctaataagggcatacaactttaaaataatgctgttttcgcaggaaacttatactgaagacgaagcgatgactaaggctacaatatatcctcgcgctgatcgtgacaaggcaggcactaggacctcattggtccctaagaagaagggacttgacccagaaatatacggtgggttttctaatagcaaaaattcatttatggttattgtaaaaattaaaacggccaaagaagatacttataaagctatacctatagctatgcggtatcgtgatacgttagaaaaagccaaaaagaataaaacttatgacgaaactctacgttctatcgtcgaaccggtagtagcaaccacaagggggtacagaggatttgatattatcgtaaaccacttgaatttcaatcaagaaatggtaaatcaaacgtatggtaattttatccttagcaaggctacttatatgtacaatggtaaccagatcgttctctcaccagatgctatgcgtatcttaactggtaaacttgaagaaaaagaagatgaagatagttcacttgtaaaagtttatgacgaaatcctagaacaagttgataaatatttacctctttttaatatgagaagctataatcaaaaactacatgatgcacgaaaagtctttgaaaaactcgatgtacgtaaaaagcggtcaactttatcctcaattttaagagggctgcattgtaattcttcctcatctgatataaaagaacttggaataggaacaggatttggattcttccaaaaacaaagtggaataccattaacaagcgatacgctaattgtttttaaatctattactggattaaggaggagaaaggtaagcctttcagacttagaacag

SEQ ID NO: 98 - DNA, 36 bp, Lactobacillus apis
gacatgtacatccatgatttgccataggtctagaac

SEQ ID NO: 99 - DNA, 138 bp, Lactobacillus apis
aaaaaagcccctgccataaggctgaggcggtacagtaataactgcgtttaaacttgtattaaaaataccttgcttgaatctaaattacctatgttcaaaacagatatgaatatctatgatttgccataggtctagaac

SEQ ID NO: 100 - DNA, 140 bp, Lactobacillus apis
aaaaaagcctctgccataaggctgaggcggtacagtaattactgcgtttaatctttgcattaaaaatacatcgcttgattctaaagcacctatacgccaaagggattatgtatatccttacttcgacataggtctagaac

SEQ ID NO: 101 - DNA, 138 bp, Lactobacillus apis
aaaaaacccctgccatagggctgaggcgatacagtaacgactgtgtttaaactcgatataaaaaacaccttgtttgattctaaataacctatactcaaaaatgatatgtacatcaatgcttgccataaatatgtgaca

SEQ ID NO: 102 - DNA, 140 bp, Lactobacillus apis
aaaaaaagcccctgccatagggctgaggcgttacagtaagaactgtgtttatactttgcgttaaaaacacgatgactgattctaaataacctatgcagaaaactgacatgtacatccatagtttgccataggtctagaac

SEQ ID NO: 103 - DNA, 140 bp, Lactobacillus apis
aaaaaagcctctgccatagggctgaggcggtacagtaataactgcgtttatacttcgcgttaaaaaacacgttgtttgattctaaataatctatattcaaaaatgatatgtacatcaatgctttgtcctaggtctagaat

SEQ ID NO: 104 - DNA, 139 bp, Lactobacillus apis
aaaaaagcccctgccatagggctgaggcggtacagtaaagactgcgtttaaactttgtaataaaaatacatcgcttgattccaaataacctatactcaaaaatgatatgtacatcaatgatttgtcataggtatagaac

SEQ ID NO: 105 - DNA, 114 bp, Lactobacillus apis
aaaaaagcccctgccatagggttggggcggtaaagtaataactgtgtttaaactttgtattaaaaatacatcgcttgattctaaactacctattctttgtcatagatctagaac

SEQ ID NO: 106 - DNA, 139 bp, Lactobacillus apis
aaaaaagcctctgccatagggctgaggtggtacagtaatgactgcgtttaaactttgtaataaaaatacatcgcttgattctaaataacctataccgaaaaccgacatgtacatccatgttttgccataggtctagaac

SEQ ID NO: 107 - DNA, 138 bp, Lactobacillus apis
aaaaaaacctctgccatagggctgaggtggtacagtaagaactgtgtttatactacgcgtcaaaaacacgttgattggttctaaataacctatacagaaaactaccatgtacatccatagtttgctatggtctagaac

SEQ ID NO: 108 - DNA, 141 bp, Lactobacillus apis
aaaaaaagcccctgccatagggctggggcggtacagtagtaactgcgtttatacttcgcgttaaaaaacacgttgcttgattctaaattacctatattcaaaaatgatatgtacatcaatgctttgtcataggtctagaac

SEQ ID NO: 109 - DNA, 140 bp, Lactobacillus apis
aaaaaaagccctgccatagggctggggcggtacagtaataactgcgttgatacttcgcattaaaaaacacgttgcttgattctaaataacctataccgaaaaccgacatgtacatccatgttttgccgtaggtctagaac

SEQ ID NO: 110 - RNA, 138 nt, Lactobacillus apis
guucuagaccuauggcaaaucauagauauucauaucuguuuugaacauagguaauuuagauucaagcaagguauuuuuaauacaaguuuaaacgcaguuauuacuguaccgccucagccuuauggcaggggcuuuuuu

SEQ ID NO: 111 - RNA, 140 nt, Lactobacillus apis
guucuagaccuaugucgaaguaaggauauacauaaucccuuuggcguauaggugcuuuagaaucaagcgauguauuuuuaaugcaaagauuaaacgcaguaauuacuguaccgccucagccuuauggcagaggcuuuuuu

SEQ ID NO: 112 - RNA, 138 nt, Lactobacillus apis
ugucacauauuuauggcaagcauugauguacauaucauuuuugaguauagguuauuuagaaucaaacaagguguuuuuuauaucgaguuuaaacacagucguuacuguaucgccucagcccuauggcagggguuuuuu

SEQ ID NO: 113 - RNA, 140 nt, Lactobacillus apis
guucuagaccuauggcaaacuauggauguacaugucaguuuucugcauagguuauuuagaaucagucaucguguuuuuaacgcaaaguauaaacacaguucuuacuguaacgccucagcccuauggcaggggcuuuuuuu

SEQ ID NO: 114 - RNA, 140 nt, Lactobacillus apis
auucuagaccuaggacaaagcauugauguacauaucauuuuugaauauagauuauuuagaaucaaacaacguguuuuuuaacgcgaaguauaaacgcaguuauuacuguaccgccucagcccuauggcagaggcuuuuuu

SEQ ID NO: 115 - RNA, 139 nt, Lactobacillus apis
guucuauaccuaugacaaaucauugauguacauaucauuuuugaguauagguuauuuggaaucaagcgauguauuuuuauuacaaaguuuaaacgcagucuuuacuguaccgccucagcccuauggcaggggcuuuuuu

SEQ ID NO: 116 - RNA, 114 nt, Lactobacillus apis
guucuagaucuaugacaaagaauagguaguuuagaaucaagcgauguauuuuuaauacaaaguuuaaacacaguuauuacuuuaccgccccaacccuauggcaggggcuuuuuu

SEQ ID NO: 117 - RNA, 139 nt, Lactobacillus apis
guucuagaccuauggcaaaacauggauguacaugucgguuuucgguauagguuauuuagaaucaagcgauguauuuuuauuacaaaguuuaaacgcagucauuacuguaccaccucagcccuauggcagaggcuuuuuu

SEQ ID NO: 118 - RNA, 138 nt, Lactobacillus apis
guucuagaccauagcaaacuauggauguacaugguaguuuucuguauagguuauuuagaaccaaucaacguguuuuugacgcguaguauaaacacaguucuuacuguaccaccucagcccuauggcagagguuuuuuu

SEQ ID NO: 119 - RNA, 141 nt, Lactobacillus apis
guucuagaccuaugacaaagcauugauguacauaucauuuuugaauauagguaauuuagaaucaagcaacguguuuuuuaacgcgaaguauaaacgcaguuacuacuguaccgccccagcccuauggcaggggcuuuuuuu

SEQ ID NO: 120 - RNA, 140 nt, Lactobacillus apis
guucuagaccuacggcaaaacauggauguacaugucgguuuucgguauagguuauuuagaaucaagcaacguguuuuuuaaugcgaaguaucaacgcaguuauuacuguaccgccccagcccuauggcagggcuuuuuuu

SEQ ID NO: 121 - DNA, 20 bp, Artificial
  synthesized Randomized PAM library targeting sequence T1
cgctaaagaggaagaggaca

SEQ ID NO: 122 - DNA, 163 bp, Artificial
  DNA encoding Lapis putative tracrRNA e with T7 initiation sequence and T1 targeting sequence
gggcgctaaagaggaagaggacaattctagacctaggacaaagcattgatgtacatatcatttttgaatatagattatttagaatcaaacaacgtgttttttaacgcgaagtataaacgcagttattactgtaccgcctcagccctatggcagaggctttttt

SEQ ID NO: 123 - DNA, 162 bp, Artificial
  DNA encoding Lapis putative tracrRNA h with T7 initiation sequence and T1 targeting sequence
gggcgctaaagaggaagaggacagttctagacctatggcaaaacatggatgtacatgtcggttttcggtataggttatttagaatcaagcgatgtatttttattacaaagtttaaacgcagtcattactgtaccacctcagccctatggcagaggctttttt

SEQ ID NO: 124 - DNA, 161 bp, Artificial
  DNA encoding Lapis putative tracrRNA i with T7 initiation sequence and T1 targeting sequence
gggcgctaaagaggaagaggacagttctagaccatagcaaactatggatgtacatggtagttttctgtataggttatttagaaccaatcaacgtgtttttgacgcgtagtataaacacagttcttactgtaccacctcagccctatggcagaggttttttt

SEQ ID NO: 125 - RNA, 163 nt, Artificial
  T7 transcribed Lapis putative tracrRNA e with T7 initiation sequence and T1 targeting sequence
gggcgcuaaagaggaagaggacaauucuagaccuaggacaaagcauugauguacauaucauuuuugaauauagauuauuuagaaucaaacaacguguuuuuuaacgcgaaguauaaacgcaguuauuacuguaccgccucagcccuauggcagaggcuuuuuu

SEQ ID NO: 126 - RNA, 162 nt, Artificial
  T7 transcribed Lapis putative tracrRNA h with T7 initiation sequence and T1 targeting sequence
gggcgcuaaagaggaagaggacaguucuagaccuauggcaaaacauggauguacaugucgguuuucgguauagguuauuuagaaucaagcgauguauuuuuauuacaaaguuuaaacgcagucauuacuguaccaccucagcccuauggcagaggcuuuuuu

SEQ ID NO: 127 - RNA, 161 nt, Artificial
  T7 transcribed Lapis putative tracrRNA i with T7 initiation sequence and T1 targeting sequence
gggcgcuaaagaggaagaggacaguucuagaccauagcaaacuauggauguacaugguaguuuucuguauagguuauuuagaaccaaucaacguguuuuugacgcguaguauaaacacaguucuuacuguaccaccucagcccuauggcagagguuuuuuu

SEQ ID NO: 128 - RNA, 158 nt, Artificial sequence
  single guide RNA (synthesized or expressed by recombinant DNA molecule)
  misc_feature (1)..(20): n is a, c, g, or u
nnnnnnnnnnnnnnnnnnnnguucuagaccuauggcaaaucauagauauucauaucuguuuugaacauagguaauuuagauucaagcaagguauuuuuaauacaaguuuaaacgcaguuauuacuguaccgccucagccuuauggcaggggcuuuuuu

SEQ ID NO: 129 - RNA, 160 nt, Artificial sequence
  single guide RNA (synthesized or expressed by recombinant DNA molecule)
  misc_feature (1)..(20): n is a, c, g, or u
nnnnnnnnnnnnnnnnnnnnguucuagaccuaugucgaaguaaggauauacauaaucccuuuggcguauaggugcuuuagaaucaagcgauguauuuuuaaugcaaagauuaaacgcaguaauuacuguaccgccucagccuuauggcagaggcuuuuuu

SEQ ID NO: 130 - RNA, 158 nt, Artificial sequence
  single guide RNA (synthesized or expressed by recombinant DNA molecule)
  misc_feature (1)..(20): n is a, c, g, or u
nnnnnnnnnnnnnnnnnnnnugucacauauuuauggcaagcauugauguacauaucauuuuugaguauagguuauuuagaaucaaacaagguguuuuuuauaucgaguuuaaacacagucguuacuguaucgccucagcccuauggcagggguuuuuu

SEQ ID NO: 131 - RNA, 160 nt, Artificial sequence
  single guide RNA (synthesized or expressed by recombinant DNA molecule)
  misc_feature (1)..(20): n is a, c, g, or u
nnnnnnnnnnnnnnnnnnnnguucuagaccuauggcaaacuauggauguacaugucaguuuucugcauagguuauuuagaaucagucaucguguuuuuaacgcaaaguauaaacacaguucuuacuguaacgccucagcccuauggcaggggcuuuuuuu

SEQ ID NO: 132 - RNA, 160 nt, Artificial sequence
  single guide RNA (synthesized or expressed by recombinant DNA molecule)
  misc_feature (1)..(20): n is a, c, g, or u
nnnnnnnnnnnnnnnnnnnnauucuagaccuaggacaaagcauugauguacauaucauuuuugaauauagauuauuuagaaucaaacaacguguuuuuuaacgcgaaguauaaacgcaguuauuacuguaccgccucagcccuauggcagaggcuuuuuu

SEQ ID NO: 133 - RNA, 159 nt, Artificial sequence
  single guide RNA (synthesized or expressed by recombinant DNA molecule)
  misc_feature (1)..(20): n is a, c, g, or u
nnnnnnnnnnnnnnnnnnnnguucuauaccuaugacaaaucauugauguacauaucauuuuugaguauagguuauuuggaaucaagcgauguauuuuuauuacaaaguuuaaacgcagucuuuacuguaccgccucagcccuauggcaggggcuuuuuu

SEQ ID NO: 134 - RNA, 134 nt, Artificial sequence
  single guide RNA (synthesized or expressed by recombinant DNA molecule)
  misc_feature (1)..(20): n is a, c, g, or u
nnnnnnnnnnnnnnnnnnnnguucuagaucuaugacaaagaauagguaguuuagaaucaagcgauguauuuuuaauacaaaguuuaaacacaguuauuacuuuaccgccccaacccuauggcaggggcuuuuuu

SEQ ID NO: 135 - RNA, 159 nt, Artificial sequence
  single guide RNA (synthesized or expressed by recombinant DNA molecule)
  misc_feature (1)..(20): n is a, c, g, or u
nnnnnnnnnnnnnnnnnnnnguucuagaccuauggcaaaacauggauguacaugucgguuuucgguauagguuauuuagaaucaagcgauguauuuuuauuacaaaguuuaaacgcagucauuacuguaccaccucagcccuauggcagaggcuuuuuu

SEQ ID NO: 136 - RNA, 158 nt, Artificial sequence
  single guide RNA (synthesized or expressed by recombinant DNA molecule)
  misc_feature (1)..(20): n is a, c, g, or u
nnnnnnnnnnnnnnnnnnnnguucuagaccauagcaaacuauggauguacaugguaguuuucuguauagguuauuuagaaccaaucaacguguuuuugacgcguaguauaaacacaguucuuacuguaccaccucagcccuauggcagagguuuuuuu

SEQ ID NO: 137 - RNA, 161 nt, Artificial sequence
  single guide RNA (synthesized or expressed by recombinant DNA molecule)
  misc_feature (1)..(20): n is a, c, g, or u
nnnnnnnnnnnnnnnnnnnnguucuagaccuaugacaaagcauugauguacauaucauuuuugaauauagguaauuuagaaucaagcaacguguuuuuuaacgcgaaguauaaacgcaguuacuacuguaccgccccagcccuauggcaggggcuuuuuuu

SEQ ID NO: 138 - RNA, 160 nt, Artificial sequence
  single guide RNA (synthesized or expressed by recombinant DNA molecule)
  misc_feature (1)..(20): n is a, c, g, or u
nnnnnnnnnnnnnnnnnnnnguucuagaccuacggcaaaacauggauguacaugucgguuuucgguauagguuauuuagaaucaagcaacguguuuuuuaaugcgaaguaucaacgcaguuauuacuguaccgccccagcccuauggcagggcuuuuuuu
